United States Patent Application Publication US 2012/0159664 A1 - sequence listing, part 3

SEQ ID NO: 10718 - protein, 148 aa, Aeropyrum pernix K1
MPSSFGCSRMSVNYATLGDLKKGSYIVIDGEPCRIVEMSRAKTGKHGSAKAHVVAICVFSGQKKSLVAPVDTRVQIPVIEKRLGQVLADMGDMVQIMDLETYDTFEVEKPGGNEEEEQLAAKLQPGVTVEYWLIMGKPKIIRIRSSSS

SEQ ID NO: 10719 - protein, 112 aa, Bartonella sp. ed19224az
ANEACLKMLQEIGSIKRIPEFIARAKDKNDPFRLMGFGHRVYKNYDPRAKIMQQTCHEVLKELNIQDDPLLDIAIELENIALNDEYFVEKRLYPNVDFYSGITLKALGFPTE

SEQ ID NO: 10720 - protein, 219 aa, ASPERGILLUS NIDULANS FGSC A4
MSSTSPSKEPEVEQEPQSGEEHEQMDKEQDNQTQGQGEFEVKEQDRWLPIANVARIMKLALPENAKIAKEAKECMQECVSEFISFITSEASEKCQQEKRKTVNGEDILFAMTSLGFENYAEALKIYLSKYRETQSARGEHQNRPPSSGYAGGGPVGGAASGPSVVRAGGAAAGGAFPEASDNAGSIMNQGLDPSEQDASAYGYPPMVGQGHNGAGGESY

SEQ ID NO: 10721 - protein, 419 aa, Oryza sativa (japonica cultivar-group)
MPEKFTNEGNKKVVMADGADHISALPDELLQYLLSFIPSREAVQTCVLSQRWRHQWKYVPALRINDVDSFYSVQQLNKFVHHLLLHRKRTPLYVCELDSFRNGEVAEWYQYAVSCEVEMLQVDTAHSADYCRLPEMAITSNHLTTLEFSGVQLGHISLDFSGCLKLEVLVMRGCKILVQKILSQSVRSLSITQCNFELNTRTHISAPSLISLELADILGWTPALERLPSLSTAFVRLDDRCEDYCLHSYYGDCGDQVSCGKYCTRFYDVHDDDCVLLGGLSNVTNLELITSPKVFIVRKDLLMRPTFSKLKTLLLNVSDADAGFGPLVYILRSSPVLEKLTLQLYEEPKAKIETDGSCNLEEQLVASKKLKVVEIKYSKIVVLCRVLQILNTCGVPRKKINIERTELWSFGSHFSFEQT

SEQ ID NO: 10722 - protein, 178 aa, Glycine max
  unsure (1)..(178): unsure at all Xaa locations
MASSMISSPAVTTVNRAGAGMVAPFTGLKSMAGFPTRKTNNDITSIASNGGRVQCMQVWPPVGKKKFETLSYLPDLDDAQLAKEVXYLLKKGWIPCLKFQLXHGFMYREHNMSPXYYYGHYWTMXKLPIFGCTDTSQVLKDLQXAKTAYLNNFIHIIXFNIIHQLHIIIFITYXPSYF

SEQ ID NO: 10723 - protein, 197 aa, Zea mays
MASPFSVPSLIMEEEGRFEAEVAEVESWWGTERFRLTKRPYTARDVVLLRGTLRQSYASGEMAKKLWRTLKAHQAGGTASRTFGALDPVQVTMMAKHLDTIYVSGWQCSSTHTCTNEPGPDLADYPYDTVPNKVEHLFFAQIYHDRKQREARMSLPRAERARAPYVDCLKPIIADGDTGFGGATATVKLCKLFRERG

SEQ ID NO: 10724 - protein, 338 aa, Mesorhizobium loti MAFF303099
MKAVICRSPGELVLEDRPAPGAPPAGWALVAVSHVGICGTDYHIFEGKHPFLAYPRIMGHEVSGTVIETGEGPDLAIGEPVVINPYLSCGKCIACRHGKPNCCVKIEVLGVHRDGAMCERILVPAQNLYPANGLSLADAAAVEFLAIGAHAVRRARADSGARALVIGAGPIGLGNAIFARIAGLDVTLLDMSSERLAFAENELGFSILDGSRGAVPDLVKDATSGEGFDVVFDATGNTRSVQSAFAHVAHGGTLVLVSVVKDDIVFSDPEFHKREMTLVGSRNALRADFDHVAASIRNGAVPLAKLVTHRTTLADTPSDLARWAHEKSGLIKAVIEIG

SEQ ID NO: 10725 - protein, 168 aa, Triticum aestivum
  unsure (1)..(168): unsure at all Xaa locations
KGTAKWFNVTKGFGFISPEDGSEDLFVHQSAIKADGYRSLNENDVVEFEVITGDDGRTKATDVTAPXGGALAGGSRPSEGGGDRCGRGGGGYCGRGYGRGGGSYRGGGGGYSSGGGSYSGGGGYGXSGGGGRYXRSSGSRRECYKCGEEGHIFRDLPPGRSGXCGGFR

SEQ ID NO: 10726 - protein, 1168 aa, Neurospora crassa
MSTAFQTTPNQSISVSATTSPSNRQYSSFHPGPTTREGPGSGYYANQHNAGQSSPHTSSQPHSRRPSAYDQPTGLEPHMSARTAFAQSIPAPVTSIASDQPPSSSDRRRNNMPTAVPPRTSSRHDPNTSSRRAQQAADRAAASRQSNTNGTMDPAVVDEAAARSRRQHQMTQDAHQRTTSSRGNPTPTSLPVRSQPNATSSRQQSSREASEILNNILIQQPEIDIERERERLAQAQAQAHAQAQAQAQAQAQAQAQQASNYNHHHRQETASQAMAAPGGDHGEESRRGHRSRHDHSKREKHTKFGEYILGNTIGEGEFGKVKLGWKQEGGVQVAIKLIKKDTVGNNPSRMAKIMREVAILKQLTHPNIVRLHKMEESDRHYGIVLEYASGGELFDYILNHRYLKDNAARRLFAQLVSGVGYLHKKGIVHRDLKLENLLLDRNRNIIITDFGFANTFDPNQELSEEEELNLSDREFVKRMGLDKVNDAGWRKGDLMQTSCGSPCYAAPELVVSDSLYTGRKVDVWSCGVILYAMLAGYLPFDDDPANPEGDNINLLYKYIVNTPLTFPEYVTPHARDLLRRILVPNPRKRADLFEVARHSWLSEYSHVVEFITSSTTTPSEIQNTTVPAEDEGESPHLARSASVREAPKKSTASPAIGGLVSKQGTVDPEAEAAYAKQQRDNKRRTVQVEYVAPNTTTQRGDIAGQQQPSSNANRNRNESQAPVESSDSRPTTSAKDKQLSQGPSAPKDAYNNKPPVSSRRPPSSQRNGGNAPTTGNAVAPPRPSRDGRPTADNQYLSGAAGAPTQRPTTGGSMQSGRPSYAQPAPPEVADANVHGRIQQPSKGSGSSHFGVPTTTPAEQQPSESADYGRPSISTGSRFDKVREDGVVKGHKRSSTMGEIGGKLFGRSGSLFGGRKSKRQQELQQAGEKTKRYPPVSMNNSMPGGENGSRPSLDSKRSRRSFSMGMGKKSSGGSITGSNGSQEKSNKRFSFIPPSLSRAFGYNKEDEPPALDSQQDLPIQEPSSVDQFLGREQNVSATTVDGMYTQLQDSQQGSPAVNTQYQYGRPSASQGFMPGTMPNAGSDPSVNSMPQAPGSTPQLQTMTQQDGLYDARKGNSRANRGVLQKNKRFVDYEGDGFARPHDHSGSSGPARKVMDFFRRRGKARGGENN

SEQ ID NO: 10727 - protein, 390 aa, Phlebia radiata
MAFNFAAILAFVSLAAVTSAAPSKTTCSNGVVVPDAVCCDFVPLASALQSEVLMGDCGEDAHELVRLIFHDAIAISQSMGPSAGGGADGSMLIFPTVEPAFFPNLGIADSVNNLIPFLSQFPTISAGDLVHFAGAVAISNCPGAPQLEFLAGRPNATAPAIDGLIPEPQDDVTKILARFKDAGNFSPAEVVALLASHSIARADHVDPTLDAAPFDSTPFDFDTQVFLEVLLKGVGFPGLANNTGEVSSPLPVTDGTDVGELRLQSDFALARDERTACAWQSFVNEQEAMATAFKNAVKKLAVLGHNRNDLVDCSAVVPVPKPATGTPATFPASTGPQDLELTCTTEPFPTLSTAPGAQQTLIPHCSDGTMTCNSVQFDGPATNFGGADDS

SEQ ID NO: 10728 - protein, 153 aa, Zea mays
  unsure (1)..(153): unsure at all Xaa locations
MASSMLSSAAVVTSPAQATMXRXPFTGLKSSSAFPVTRKANNDITSIVSNGGRVSCMKVWPPVGKKKFETLSYPXLTXTEXELGKEVDYLLRHXWIPXCVEFELXHGXVYREHGSTPXYYDGRYWNNGGSFPLVRMALPLPGLKGSRGQNGVP

SEQ ID NO: 10729 - protein, 407 aa, Gloeobacter violaceus PCC 7421
MSRVLFRQVRRLDPDTGTDSIADWLWDSATGRAEPTGDPAVRADRAIDGAGRLILAPTLCDLYVRSGEPGHEEREDLASLAAAAAAGGYSQVAILPHTEPPVDDPAQVDFLRRHFPAGPVEALVLGAISRNCAGEALAEVSSLLEAGVVGFTDARPLANWALLRRFLDYAAVLERPVLVWPCFAPLATGIALEGDWAIRLGLAGRPPQAEGIALAGVLELVRLTGTAVHLMRLSTARSVEMAAQAKADGLPVTASTTVHHLVHASPDLAEYDPNLRFEPPLGNPADRAALVAALEAGIIDAVASDHTPWTYEEKTLPFSQAPPGAIALELVLPLVWNLVREGRLTPLRAWEALSSAPRRILALKHPQVLVLFDPDKTWVPGTDTLHSRSLATAWLGRTVQGRVLEVF

SEQ ID NO: 10730 - protein, 430 aa, Haemophilus influenzae R2866
MMDEQSLLAFDTQHIWHPYSSVSSDMPLYAVERADGVMITLKDGRRLIDGMSSWWAALHGYNHPRLNAAAQNQLAKMSHIMFGGFTHDPAVELAQLLVQILPNGLDKIFFADSGSVAVEVAMKMAIQYQHAKGEVQRQKFATIRSGYHGDTWNAMSVCDPTTGMHHLFHHSLPVQYFLPQPNIPFNESWNDCVIEPLADLLKKKGSEIAALILEPVVQGAGGMYFYSPTYLVKAQALCKQYGVLLIFDEIATGFGRTGKLFAAEHAGISPDIMCIGKALTGGYLTLSASITTTEIAQTICSGEAKCFMHGPTFMANPLACAIATESIRLLLESPWQQNIQRIEHYLKQQLSPLSEKDYVKEVRVLGAIGVVEMKSAVNMKTLVPRFVEQGVWIRPFGKLVYVMPPFVIKDDELQKLTEGMILALIQEYEH

SEQ ID NO: 10731 - protein, 481 aa, GIBBERELLA ZEAE PH-1
MAVGSSKQINFTEFYNLIDGKLETTKETLQNTNPSTLEKNHPAPVATQEDVDRAVEAAKKASESWSEVPWEERQALVTKYAEGIDALKDEFAHLLVKEQGKSLAMAHFEIMLSVQFLKGYASLPDPQRVIEDKPDCKVVTKYVPLGVAVGIVPWNFPIFLTTAKIGPALIAGNSFILKPSPFTPYCGLKLAELASQYFPSGVVQALSGDDNLGPWLTAHPGVDKISFTGSTATGKKVVASAAPTLKRVTLELGGNDPSIVCDDVDVKEVAPKIAFAALMNSGQLCMAIKRVYVHESIYDDFVKELAAAVNSFTVGDGMDEKTSLGPVQNQMQFDRVKNLLADIESNGYKLAAGSTSASTAGKGYFITPTIVENPPDESRIVVEEPFGPVFPVLKWTDEADVLRRANDTDMGLSASVWTKDMEKAERLSSKIKAGTVWVNNHVQLNPAVPFGGAKHSGHGAEHGIEGIKAYCTTKSLYFNKA

SEQ ID NO: 10732 - protein, 381 aa, Arabidopsis thaliana
MTNHLQDPLPTYPKPVLTKEEQEVDEKMVSLQAESIVNTVAFPMVLKAAFELGVIDTIAAAGNDTWLSPCEIACSLPTKPTNPEAPVLLDRMLSLLVSHSILKCRMIETGENGRTGKIERVYAAEPVCKYFLRDSDGTGSLVPLFMLLHTQVFFKTWTNLKDVILEGRDAFNSAHGMKIFEYINSDQPFAELFNRAMSEPSTMIMKKVLDVYRGFEDVNTLVDVGGGNGTVLGLVTSKYPHIKGVNFDLAQVLTQAPFYPGVEHVSGDMFVEVPKGDAVFMKWILHDWGDEDCIKILKNCWKSLPEKGKIIIVEFVTPKEPKGGDLSSNTVFAMDLLMLTQCSGGKERSLSQFENLAFASGFLRCEIICLAYSYSVIEFHK

SEQ ID NO: 10733 - protein, 490 aa, Leuconostoc mesenteroides
MEIQNKAMLITYADSLGKNLKDVHQVLKEDIGDAIGGVHLLPFFPSTGDRGFAPADYTRVDAAFGDWKDVEALGEEYYLMFDFMINHISRESVMYQDFKKNHDDSKYKDFFIRWEKFWAKAGENRPTQADVDLIYKRKDKAPTQEITFDDGTTENLWNTFGEEQIDIDVNSAIAKEFIKTTLEDMVKHGANLIRLDAFAYAVKKVDTNDFFVEPEIWDTLNEVREILTPLKAEILPEIHEHYSIPKKINDHGYFTYDFALPMTTLYTLYSGKTNQLAKWLKMSPMKQFTTLDTHDGIGVVDARDILTDDEIDYASEQLYKVGANVKKTYSSASYNNLDIYQINSTYYSALGNDDAAYLLSRVFQVFAPGIPQIYYVGLLAGENDIALLESTKEGRNINRHYYTREEVKSEVKRPVVANLLKLLSWRNESPAFDLAGSITVDTPTDTTIVVTRQDENGQNKAVLTADAANKTFEIVENDQTVMSSDNLTQN

SEQ ID NO: 10734 - protein, 381 aa, Arabidopsis thaliana
MSNHLQDPLTTYPKPGLTKEEQEIDEKMVSLQAESIVNAVAFPMVLKAALELGVIDTIAAASNGTWLSPSEIAVSLPNKPTNPEAPVLLDRMLRLLVSHSILKCCMVESRENGQTGKIERVYAAEPICKYFLKDSDGSGSLSSLLLLLHSQVILKTWTNLKDVILEGKDAFSSAHDMRLFEYISSDDQFSKLFHRAMSESSTMVMKKVLEEYRGFEDVNTLVDVGGGIGTILGLITSKYPHIKGVNFDLAQVLTQAPFYPGVKHVSGDMFIEVPKGDAIFMKWILHDWGDEDCIKILKNCWKSLPEKGKVIIVEMITPMEPKPNDFSCNTVLGMDLLMLTQCSGGKERSLSQFENLAFASGFLLCEIICLSYSYSVIEFHK

SEQ ID NO: 10735 - protein, 45 aa, Staphylococcus intermedius
EKGFGFIEVEGENDVFVHFSAINQDGYKSLEEGQAVEFEVVEGDR

SEQ ID NO: 10736 - protein, 493 aa, Pseudomonas syringae pv. tomato str. DC3000
MSLTRFQMCIDGQWVDALSGKTFDSLNPALAEPWAQLPDAGEADVERAVQAAQKAFESQEWRGLTATARGKLLRRLGDLIAENKEHLAQLESRDNGKLIRETRGQVSYLPEFFHYTAGLADKLEGGTLPLDKPDLFAYTVHEPMGVVAGIIPWNSPLYLTAIKLAPALAAGNTIVLKPSEHASATVLELARLALEAGIAPGVVNVITGYGPTTGAALTRHPLVRKIAFTGGAATARHVVRSSAENFAKLSLELGGKSPNIIFADADLDSAINGAVAGIYAASGQSCVSGSRLLVQDEIYDEFVERLAERASRIRIGNPLDESTEMGPMATAQQLAVVEGLVADALAEGARLRLGGKRPELDSKGWFYEPTLFECDHNSMKIMQEEVFGPVASVIRFKDEAEALAIANDSQFGLAAGIWTRDLGRAHRLARDIRSGIIWVNTYRAVSAMAPIGGFKNSGYGRESGIDSVLAYTELKTVWINLSQAPMPDPFVMR

SEQ ID NO: 10737 - protein, 281 aa, Clostridium tetani E88
MDLWLKEGQISDAVMTYKIKETLVRKKTEYQDLAIVDTYALGRMLVLDGIVQTSIKDEYVYHEMITHIPLYTHPNPKKVLVVGGGDGGTIREILKHPSVEKAVLCEIDEEVVKECKKHLPEISNNALEDSRCEVFIGDGIKYVNEHKNEFDVVIIDSTDPFGAAEGLFGGSFYGKISECLTEDGIFVAQTETPFYLPEIVKRVYDDSKAVFPVTKLFMAAIPTYPSGYWSFTIGSKKHDPEKAPVPEVLPFETKYYTPRLHSASFVLPKFVENLIFANISE

SEQ ID NO: 10738 - protein, 45 aa, Streptococcus pyogenes
EKGFGFISTENGQDVFAHFSAIQTNGFKTLEEGQKVAFDVEEGQR

SEQ ID NO: 10739 - protein, 217 aa, Oryza sativa (japonica cultivar-group)
MASTELASDVYALPCGDDGTTALSTPVVVSVLASLLERHIARNERDQAAAADGEAARRARAFDSGTVLDMSLHAFLERFSRYANVSPQVYVVAYAYLDRLRRGDGVRVVSANAQRLLTTAILVASKFVEDRNYKNSYFAAVGGLTAAELSSLELDFLFLMQFRLNVSVSVFQSYCRHLEREVSYGGGYQVERCLKKALVCSGEAQAQQRQAASAAAQ

SEQ ID NO: 10740 - protein, 370 aa, Glycine max
  unsure (1)..(370): unsure at all Xaa locations
METVLFNHSPPLEFKGLSKEEEDSLLGQVEIWRYMTCFTDSVALKAVIELRIADILDRYGKPLSLSQIVENIEDAPSPDASLLQRVLRXMVRRKIFSAQESETGETLFGLTRASKWILRDTKMTLAPMLLLENHPIHLNPAHYISEIIREGTKXALAFFKCHGHEQFEMTGLDPEYNRLFNEGMVCTXARVVSKAVITGYKDGFNQIKSLVDVGGGIGGSLSEIVRAYPHINAINFDLPHVVATAPKFDGITHVGGDMFVSIPSADAIYMKWILHDWSDEHCIKILKNCRKAIPEKTGKVIIVDHVLRPEGQXLFTDVGIAFDMMLLAHNAGGKERTEENWKWLFKETGFARYNIIKINALPSIIEAFPI

SEQ ID NO: 10741 - protein, 46 aa, Salmonella enterica subsp. enterica serovar Virchow
DKGFGFITPDDGSKDVFVHFSAIQNDGYKSLDEGQKVSFTIESGAK

SEQ ID NO: 10742 - protein, 130 aa, Nostoc punctiforme PCC 73102
MSAATDQILEQLKTLSLLEASELVKQIEEAFGVSAAAPVGGMMMMAGPGGAAPAEEAVEQTEFEVILDSVPADKKIAVLKIVRELTGLGLKEAKDLVEAAPKAVKEGIAKDAAEDAKKRIEEAGGKVTIK

SEQ ID NO: 10743 - protein, 46 aa, Yersinia enterocolitica
DKGFGFITPADGSKDVFVHFSAIQSNDFKTLDEGQKVEFSIENGAK

SEQ ID NO: 10744 - protein, 476 aa, Pseudomonas syringae pv. tomato str. DC3000
MYPDVQLYIDGQWRASRDGRSIPVIDPATGQSLGSVAHAGIADLDEALSAAERGFATWRATSAYDRYKLMQKAADLVRERADSIARIMTQEQGKPLAEARMETLSAADVIDWLAEEGRRSYGRIVPSRGVSIEQKVIKEPVGPVAAFTPWNFPINQVVRKLSSALAAGCSIIVKAPEETPGSPAELIRAFADAGVPAGVIGLVYGDPAEISGYLIPHPVIRKVTFTGSTPVGKQLAALAGKHMKRATMELGGHAPALVFDDADIDLAARVLATAKFRNAGQVCVSPTRILVQRKVLQAFTEKFVGLTREIKVGNGLESGTTMGPVANDRRIPALVDLIEDAVSAGATVSAGGKAVEGQGYFFEPTVLSGLTPAMRIMNEEPFGPVALLVPFDTVEEAIVESNRVPFGLASYAFTTSMKTAQALSTYIEAGMLSINHQGIGLPEVPFGGIKDSGYGSEGGTEAIEAYLNTKLVTQYS

SEQ ID NO: 10745 - protein, 499 aa, Streptomyces avermitilis MA-4680
MTPGTPGNPAAPVTPGASDAQRLFIGGEWVAPDGGHYEVIDPATEAVVGWAPEASRDQVHAAAAAAREAFAAWSRTPAEERAAVLGRAAEVMRRNLVPYAELAQAESGATTGTARGMQVGVGAARFRRYARVEPAEEPIAPQINEAGPFGRAAVMGALAVRQPVGVVTCITSYNNPWANPAGKIAPALAMGNTVVVKPAPQDPLSVYRMAEALQAAGVPPGVVNVVSGSGAQAGEAAVDCPDVDMVSFTGSTAVGQRIAEVCGRGMKRQLMELGGKGAALVFEDADLASAVSGIGTTFSFYSGQICTAPTRVLAQRGVYDRVVDQLAAYARRLPVGDPRAPGTVVGPVISAAHRDRVESYVELGRKEGARVVTGGERPPCATGFYVAPTLLADCTTDMRVVREEIFGPVVAVLPFDDEEEGIELANSSDYGLIDYVWSADVARAFRVARRLRAGGVGVNTVGRNMEAPFGGFKRSGVGRDVGSYALHAYSELQAIVWPG

SEQ ID NO: 10746 - protein, 398 aa, Glycine max
MSLTLQTPPSTTLSSASPIHRTITRYTTFSFSLRPPTTLHFNPHRSLPLIRASNSSINAASTTELDAVSAFSEIVPDTVVFDDFEKFPPTAATVSSSLLLGICGLPDTIFRNAVEMALADSECYGLENPNARLSCFVNKAFANIGSDMAKLVPGRVSTEVDARLAYDTHAIIRKVHDLLKLYNDSNVPPQRLLFKIPSTWQGIEAARLLESEGIQTHLTFVYSFAQAAAAAQAGASVIQIFVGRIRDWARNHSGDTEIESAQLRGEDPGLALVTKAYNYIHKYGHKSKLMAAAVRNKQDLFSLLGVDYIIAPLKVLQSLKESVASPDEKYSFVRRLSPQSAAKYTFSDEELVRWDEDSLSKAMGPAAVQLLAAGLDGHADQAKRVEELFGKIWPPPNV

SEQ ID NO: 10747 - protein, 308 aa, Pseudomonas putida KT2440
MTSKLEQLKQFTTVVADTGDLDAITRLKPVDATTNPSLLLKAAAIPGYADLLKQVKADAKGNVDLACDKFAVAVGSGILKVIPGRISTEVDARLSFDEPALLNKARQLIALYEAAGVAKERVLIKLASTWEGIRAAEQLEKEGIQTNLTLLFSFAQAQACADAGVFLISPFVGRIYDWYKKSTGQEYVGAEDPGVQSVTRIYNYYKANGYNTVVMGASFRNIGQIEQLAGCDRLTISPELLQQLSDDQGELPQVLKPGNAGEAKQHLNESQFRWAMNEDAMGTEKLAEGIRQFARDQEKLEKLIAEKA

SEQ ID NO: 10748 - protein, 416 aa, Deinococcus radiodurans R1
MTITITNIKRVGSEQTESLTIENGLIKGWNLPAEGEIFDGQGGTLAPALIELHAHLREPGQTEKEDLASGLAAASAGGYGTVVCMPNTRPVIDDPALVRSLIEKARGLGFARLRPAAAVTKGEKGEQLTEMSYLKEAGAVMFTDDGLTNENARVLRLGMEYAKSLGMVISVHAEDDALRAGGVMNEGPVSESLGLPGNPAAAAAARVARDMEIVALTGARLHVQHLSTARELDIVRDAKRRGLPVTCEVCPHHLDLTDESLRTFDAMYKVAPPLRTRADADYLLEGLLDGSVDCIATDHAPHTRAEKERDLLDAPSGIAYIEIAFPIMWTRFGERLGLEKLIDLMTAGPARVMGWPEPSLEAGAPADMVVLDLETEREVNPAEFKSKAKFTPWQGQKLRGFPLLTVVDGKVAYRRE

SEQ ID NO: 10749 - protein, 159 aa, Burkholderia cepacia R18194
MSTLYSFSAETLAGAPASLDAYRGKVLLIVNTASECGFTPQYAGLQKLYDQYAARGFYVLGFPCNQFGKQEPGDAAQIGAFCERNYGVTFPMFAKIDVKGDHAHPLYRYLTDEAPGILGLKAIKWNFTKFLVDREGRIVKRYAPSTKPDEIAADIDKLL

SEQ ID NO: 10750 - protein, 161 aa, Brassica napus
  unsure (1)..(161): unsure at all Xaa locations
MXSSMLFLRCVSPTSPGHAXMVAXFXGLKXSAXFPXTXLADXDITSIXXXXXRXSCMXVXXXXGKKKFETLSYLPDLXEXELTEEXEYLLRXXXXPCVXFELQXXFVYXEHVCTPGYDDGXYXXRWXVXLXXXXDSARVMKEXXXVKXGXPXAFXXIIGXD

SEQ ID NO: 10751 - protein, 199 aa, Zea mays
MEDEEHEVYGQEIPVDGEDVDMSAGDDATKLQELDEMKRRLKEMEEEAAALREMQAKVAKDMQDPNATTSENKEEMDSRSVFVGNVDYACTPEEVQQHFNSCGTVNRVTILTDKFGQPKGFAYVEFVEVEAVQEAIKLNESELHGRQLKVAPKRTNVPGMKQPRGRGFNPYRPYGYSPYGYGYGYGRFPRFRRPRRPYF

SEQ ID NO: 10752 - protein, 107 aa, Triticum aestivum
  unsure (1)..(107): unsure at all Xaa locations
VPVEPHLGCSSNILRGGEGASPEGFSGXPGAXXNPPAAGDGGLPGGVNXXKQPGWGGPFPXSXHAHGIQFRLYALDDXFXLGNKVTXDKFMEXIEGHXXGEAXITXV

SEQ ID NO: 10753 - protein, 422 aa, Staphylococcus aureus subsp. aureus MRSA252
MTAEKITQGTEGLNVPNEPIIPFIIGDGIGPDIWKAASRVIDAAVEKAYNGEKRIEWKEVLAGQKAFDTTGEWLPQETLDTIKEYLIAVKGPLTTPIGGGIRSLNVALRQELDLFTCLRPVRWFKGVPSPVKRPQDVDMVIFRENTEDIYAGIEFKEGTTEVKKVIDFLQNEMGATNIRFPETSGIGIKPVSKEGTERLVRAAIQYAIDNNRKSVTLVHKGNIMKFTEGSFKQWGYDLALTEFGDQVFTWQQYDEIVEKEGRDAANVAQEKAEKEGKIIIKDSIADIFLQQILTRPAEHDVVATMNLNGDYISDALAAQVGGIGIAPGANINYETGHAIFEATHGTAPKYAGLNKVNPSSVILSSVLMLEHLGWQEAADKITDSIEDTIASKVVTYDFARLMDGAEEVSTSAFADELIKNLK

SEQ ID NO: 10754 - protein, 283 aa, Triticum aestivum
  unsure (1)..(283): unsure at all Xaa locations
MAKTYPVVSAEYQEAVEKARQKLRALIAEKNCSPLMLRLAWHSAGTFDVSSKTGGPFGTMKKPAEQAHAANAGLDIAVRMLEPIKEEIPTISYADLYQLAGVVAVEVSGGPVIPFHPGREDKPQPPPEGRLPDAXQGSDHLRQVFGKQMGLSDQDIVALSGGHTLVSLHICSICFHVIYLDRCMHALTLFSCVSLFLXGRCHKERSGFEGPWTRNPLKFDNSYFTELLSGDKEGLLQLPSDKTLLTDPVFRPLVEKYAADEKAFFEDYKEAHLRLSELGYAEA

SEQ ID NO: 10755 - protein, 373 aa, Staphylococcus aureus subsp. aureus MRSA252
MAELQRGLEGVIAAETKISSIIESQLTYAGYDIDDLAENAQFEEVIFLLWNYRLPNEEELAHLKGKLNQYMTLNPRVYTHFEEYVTDHVHPMTALRTSLSYIAHFDPDAENESDENRYERAMRIQAKVASLVTAFARVRQDKEPIKPNPDLSYAANFLYMLRGELPTDIEVEAFNKALILHADHELNASAFTARCAVSSLSDMYSGIVAAVGSLKGPLHGGANEQVMTMLSEIGSIENVDAYLDEKFANKDKVMGFGHRVYKDGDPRAKYLREMSRQITKDAGREELFEMSVKMEKRMAEEKGLIPNVDFYSASVYHCMEIPHDLFTPIFAVSRSAGWIAHILEQYKDNRIMRPRAKYIGETNRKYIPLEERK

SEQ ID NO: 10756 - protein, 486 aa, Pseudomonas putida
MKEIKHFINGEYVESASGKLFDNVNPANGQVIAKIHEAGEAEVDAAVKAARAALKGPWGRMTVAERTEILHRVAAGISARFDEFLEAECLDTGKPKSLASHIDIPRGAANFSVFADLVKNVPTEAFEMATPDGTGALNYGVRRPKGVIGVISPWNLPLLLMTWKVGPALACGNTVVVKPSEETPTTTALLGEVMNAAGVPAGVYNVVHGFGGNSAGAFLTAHPDVDAYTFTGETGTGETIMRAAAKGLRQVSLELGGKNAGIVFADCDLDKAIEGTLRSAFANCGQVCLGTERVYVERSIFDEFVARLKAGAEALVIGPPDDASSNFGPLVSLKHREKVLSYYQQAVDDGATVVTGGGVPEMPAHLAGGAWVQPTIWTGLADNSVVVTEEIFGPCCHIRPFDREEEAIELANSLPYGLASAIWTENASRAHRVAGQIEAGIVWVNSWFLRDLRTAFGGSKQSGIGREGGVHSLEFYTELKNICVKL

SEQ ID NO: 10757 - protein, 346 aa, Glycine max
LEPLGVVGHITPWNFPNTMFYIKVAPSLAAGCTMVLKPAEQTPLSALFNAHLAKLAGIPDGVINVVPGFGPTAGAALSSHMDVDKVSFTGSTQTGREIMQAAAKSNLKQVSLELGGKSPLIIFDDADIDKAAELALLGILYNKGEVCVASSRVLVQEGIYDEFEKKLVEKAKAWVVGDPFDPKVQQGPQVDKEQFEKVLSYIEHGKKEGATLLTGGKTVGNKGYFIEPTIFSNIREDMLIAQDEIFGPVMALKKFKTIEEAIKSANNTKYGLAAGIVTKNLDTANTVSRSIRAGTIWINCYFAFGDDVPFGGYKMSGFGKDHGLEALHKYLQVKSVVTPLYNSPWL

SEQ ID NO: 10758 - protein, 128 aa, Brassica napus
MATVGRNIAAPLLFLNLIMYLIVLGFASWCINKYINGQTNHPSFGGNGATPFFLTFSILAAVIGIASKLAGGNHIRFWRNDSLAAAGSASIVAWAVTALAMGLACKQINIGGWRGWRLRMIEAFIIIY

SEQ ID NO: 10759 - protein, 428 aa, Pseudomonas aeruginosa PAO1
MADKKAQLIIEGSAPVELPVLSGTMGPDVVDVRGLTATGHFTFDPGFMSTASCESKITYIDGDKGVLLHRGYPIEQLAEKSDYLETCYLLLNGELPTAAQKEQFVGTIKNHTMVHEQLKTFFNGFRRDAHPMAVMCGVIGALSAFYHDSLDINNPKHREVSAHRLIAKMPTIAAMVYKYSKGEPMMYPRNDLNYAENFLHMMFNTPCETKPISPVLAKAMDRIFILHADHEQNASTSTVRLAGSSGANPFACIASGIAALWGPAHGGANEAVLRMLDEIGDVSNIDKFVEKAKDKNDPFKLMGFGHRVYKNFDPRAKVMKQTCDEVLQELGINDPQLELAMKLEEIARHDPYFVERNLYPNVDFYSGIILKAIGIPTSMFTVIFALARTVGWISHWQEMLSGPYKIGRPRQLYTGHTQRDFTALKDRG

SEQ ID NO: 10760 - protein, 282 aa, Bifidobacterium longum DJO10A
MLEPPVTPIRKANDGLELPATGFGTYKVNGLAGVDAIKSAIHQGYRLIDSAFNYENEGVVGRAIRESGVPREDIIVTSKLPGRHHAHDEALLTIEESVCRMGLDYIDLYLIHWPNPSQGQFVEAWEALVEARERGLVKHIGVSNFLPGHIDLLIRDTGVTPAVNQVELHPYFQQREQLAYDNAHGIITEAWSPLGRANQMLRDPDLKRIAAKHGISVVQAILRWHLQYGDVAIPKSLNPERQRQNLDLTAFELDDQDMADIAAMDNPEGHTFGQNPHWHEEA

SEQ ID NO: 10761 - protein, 237 aa, Fischerella sp. PCC 7603
MTEATAEEYSPTNAPPLTKEQALSNLQSPDLSLRYYAAWWLGKFRVRSPAVVDALLAALEDETDRTEMGGYPLRRNAARALGKLGDLRAVPGLIKCLQCSDFYVREAAAQSLAMLKDKRAAQALMQLLEPGVAAAVQVPGRPHLTQPYEAILEALGAMGATEAIPLIEPFLEHPMPRVQCAAARAMYQLTRDFCYGEYLVKMLDSSNLQLRRVALADLGAIGYMPAAEAIAAGQGRK

SEQ ID NO: 10762 - protein, 400 aa, Zea mays
MYSLGRKLGQGQFGTTYLCVDKATGLEYACKSIAKRKLVTDEDVEDVRREIQIMHHLAGHPNIIAIRGAYEDSVAVHVVMELCAGGELFDRIVRRGHYTERQAGELARVIVAVVESCHSLGVMHRDLKPENFLFVGNDEESPLKTIDFGLSMFFRPGEEFTDVVGSPYYVAPEVLKKRYGQEADVWSAGVIIYILLCGVPPFWAETEQGIFEQVLHGSLDFDSDPWPSVSGDAKDLLRKVLVRDPKKRLTAHQVLCHPWLQTIASAPDKPLDSAVLSRLKQFSAMNKLKKMALRVIAENLSEEEIAGLKEMFKMMDTDNSGQINFEELKAGLEKVGANMKESEIYQLMQAADIDNSGTIDYGEFIAATLHLNKIEREDHLFAAFQYFDKDGSGYITADEL

SEQ ID NO: 10763 - protein, 165 aa, Aegilops speltoides
VMASSATTVTPFHGLKSTAGLPVSRRSSGSLGRVSNGGRIRCMQVWPIEGIKKFETLSYLPPLSTEALLKQVDYLIRSKWVPCLEFSKVGFVFREHNSSPGYYDGRYWTMWKLPMFGCTDATQVLNEVEEVKKEYPDAYVRVIGFDNLRQVQCVSFSAFRPPGCE

SEQ ID NO: 10764 - protein, 165 aa, Aegilops speltoides
VMASSATTVTPFHGLKSTAGLPVSRRSSGSLGRVSNGGRIRCMQVWPIEGIKKFETLSYLPPLSTEALLKQVDYLIRSKWVPCLEFSKVGFVFREHNSSPGYYDGRYWTMWKLPMFGCTDATQVLSEVEEVKKEYSDAYVRVIGFDNLRQVQCVSFIAFRPPGCE

SEQ ID NO: 10765 - protein, 213 aa, Arabidopsis thaliana
MGCFHSKAAKEFRGHEDPVKLASETAFSVSEVEALFELFKSISSSVVDDGLINKEEFQLALFKSRKRENIFANRIFDMFDVKRKGVIDFGDFVRSLNVFHPNASLEDKIDFTFRLYDMDCTGYIERQEVKQMLIALLCESEMKLADETIEIILDKTFEDADVNQDGKIDKLEWSDFVNKNPSLLKIMTLPYLRDITTTFPSFVFHSEVDEIAT

SEQ ID NO: 10766 - protein, 165 aa, Aegilops speltoides
VMASSATTVTPFHGLKSTAGLPVSRRSSGSLGRVSNGGRIRCMQVWPIEGIKKFETLSYLPPLSTEALLKQVDYLIRSKWVPCLEFSKVGFVFREHNSSPGYYDGRYWTMWKLPMFGCTDATQVLSEVEEVKKEYPDAYVRVIGFDNLRQVQCVSFIAFRPPGCE

SEQ ID NO: 10767 - protein, 435 aa, Zea mays
MSQRDGDLTGAHPEEGDRHAVRMDGSDDDELDQPTSKATEHITAMDVRKGKDMQGIPWNVMPTTRDKYRQSRLQGYANFENVPNSGRLSEKECMPAEKGQLYYEFQHSTRSVKPTIRHFQLRNLVWATTRHDVYLMSNFSVLHWSAMTCKKQEVINLLGHVTPCEKHHRNYYEGFYRTPVSTLAVKHNLLVTGGFHGEIICKFLDRQGVSYCCKTTNDDDGITNSLEIFEKPSGSLHFLASNNDCGLRDFDMEKFRICNHFHFAWPVNHTSLSPDGKLAAIVGDSPDGLLIDANSGKTVHKLHGHLDYSFASAWNPDGRTFATGNQDKTCRVWDVRNLSRSVVVLGGNIGAVRSIRYTPDGKFMAMTEPADFIHIFDVESGYSRKQELDFFGEIAGISFSPDTEALFVGVHDRFFSCCLLQFNRRRFYSYLDSTL

SEQ ID NO: 10768 - protein, 488 aa, Listeria monocytogenes EGD-e
MADVRKLKNYIDGEWVESKTDKYEDVINPATGEVLCQVPISTRAELDQAAVIAEQAFEKWSQVAVPRRARVLFGFQQLLIQHKEELARLITLENGKNLSEARGEVQRGIENVEFAAGAPTLMMGDSLASIATDVEAANYRYPVGVVGGIAPFNFPMMVPCWMFPMAIALGNSFILKPSERTPLLMEKLVELFSEAGLPKGVFNVVYGAHDVVNGILENEIIKAVSFVGSKPVGEYVYKTGSANLKRVQALTGAKNHTIVLNDADLEDTVTNVISAAFGSAGERCMACAVVTVEEGIADEFLEALRTAAQNVKIGNGLDDGVFLGPVIREENQKRTIAYIEKGIEEGAKLTVDGRETGLSEGHFVGPTILEDVTTDMTIWKDEIFAPVLSVIRVKNLQEAVRVANQSEFANGACIFTNNAKAIRYFREKIDAGMLGVNLGVPAPMAFFPFSGWKSSFYGTLHANGKDSVDFYTHKKVVTARYSLKGYEE

SEQ ID NO: 10769 - protein, 165 aa, Aegilops speltoides
VMASSATTVTPFHGLKSTAGLPVSRRSSGSLGRVSNGGRIRCMQVWPIEGIKKFETLSYLPPLSTEALLKQVDYLIRSKWVPCLEFSKVGFVFREHNSSPGYYDGRYWTMWKLPMFGCTDATQVLSEVEEVKKEYPDAYVRVIGFDNLRQVQCVSFIAFRPPGWE

SEQ ID NO: 10770 - protein, 239 aa, Eriobotrya japonica
MGGGRVQLKRIENKINRQVTFSKRRTGLLKKAHEISVLCDAQVAVVVFSNKGKLFEYATDSCMEQILERYERYSYAERQLVEPEFESQGNWTFEYCRLKAKVEVLQRNHRHYLGEDLDSLTLKEIQNLEQQLDTALKQIRLRKNQLMHESISELQRKRKAIQEENNLLAKKIKEKEKAAAQPQVQDWEQQNIGLDLLPQPLPCLNNGGTQQDEFLQVRRNQLDLTLEPLYSCHLGCFAA

SEQ ID NO: 10771 - protein, 431 aa, Burkholderia fungorum LB400
MLPVAVAGEGIEIIDSTGKRYIDASGGAAVSCLGHSNQRVIDAIKRQSQQLPYAHTSFFTTEPAEALADRLVASAPQGLEHVYFVSGGSEAIEAALKLARQYFVEKGEPRRRHFIARRQSYHGNTLGALAIGGNAWRREPFLPILIEAHHVSPCYAYREQRADETEEAFAQRLADELERKILELGADTVAAFIAETVVGATAGAVPPVREYFRKIRAVCDRYGVLLILDEIMSGMGRTGYLYACEEDGVAPDILTIAKGLGAGYQPIGATLVSERIYQAIVGGSGFFQHGHTYIGHATACAAALEVQRVIEEDNLLPNVLARGEQLRVRLREHYAQHPHIGDVRGRGLFVGVELVRDRAGKTPFDAALKLHAAIRREAFARGLMVYPMGGTVDGKIGDHVLLAPPFICTARDIDEIVSRLTDAIDGALAAV

SEQ ID NO: 10772 - protein, 337 aa, ASPERGILLUS NIDULANS FGSC A4
MSISSTSPPYPLHPSVKDLLDPEYVAFYNAHVIDKQQVHLQPVETSRTSGILIPGGGPLVDVGKTVDITIKRRATEGPEILLRAFTPIGEAPEGGWPVMLYFHGGGWVLGNIDTENVVCTNLCSRGGCVVVTVDYRLAPENPWPAAVHDCWESFLWLLSDGPANLNINISKIATGGSSAGGNLAAIITHKALTLSPPVRFLAQLLSVPVMDNTATVSNNESYRRYEFVPALPAAKMLWYRNHYLPNEKDWSHPEASPLFYTGDWSALPRALIMVGELDVLRSEGEQYAEKLKQAEVEVDLQVMKGMPHPFLAMDGVLKEGKRSITLMCDLLKEVFSS

SEQ ID NO: 10773 - protein, 497 aa, Pseudomonas aeruginosa UCBPP-PA14
MIDGLLRSLGLDPNAFRDGELAVHTPIDGSRLAAVPLEGRAAVAAKVERAEQAFRAWRQVPAPRRGELVRLFGEELRRHKAELGELVSWEAGKITQEGLGEVQEMIDICDFAVGLSRQLYGLTIASERPGHHMRETWHPLGVVGVISAFNFPVAVWSWNTALALVCGNSVVWKPSEKTPLTALACQALFERAARAFGGDAPAHLSQLLIGDREAGEALVDDRRVALVSATGSTRMGREVAPRVAARFARCILELGGNNAMILAPSADLDLAVRGILFGAVGTAGQRCTTLRRLIAHESVKDEIVERLKAAYSRVRIGHPLEGNLVGPLIDERSYLAMQDALARAREEGGRVFGGERQLQERYPDAYYVSPAIVEMPGQTEVVRTETFAPILYVVGYRDFDEALRLNNEVPQGLSSCIFTTDLREAELFQGAAGSDCGIANVNIGTSGAEIGGAFGGEKETGGGRESGSDAWKAYMRRQTNTVNYSRELPLAQGITFD

SEQ ID NO: 10774 - protein, 144 aa, Clostridium perfringens str. 13
MLDQKTIDIIKSTVPVLKSNGLEITKTFYKNMFEQNPEVKPLFNMNKQESEEQPKALAMAILAVAQNIDNLEAIKPVVNRIGVIHCNAKVQPEHYPIVGKHLLGAIKEVLGDGATEDIINAWAKTYGVIAEVFINNEKEMYASR

SEQ ID NO: 10775 - protein, 318 aa, Ralstonia eutropha JMP134
MAIDPQLLAYYRRLAEQYGALPVPVDARARRERFAEVAASSVVPDPAGTTWEDLTLALEGRSLTARLFRPVADAPSRLIVYFHGGGWVVGSHETHHTVAALLAADTGCAVASVDYRLAPEYAFPAPCDDAVDAVRWFAVQRASLGFDTGFLAVAGDSAGGHLAALAAQQVNTEARQQVVVAQLLVYPVTAPVLSSESYRAFADGPGLTRDEMAWFWTQFIGAESLARGAQHEDLRIHLMAQAPKVQPPATAIVVAANDVLRDDGLAYADFLVRHDATVVTIEASGMTHGFARLQPDAPRAREWMQRAAQAFASLFDDV

SEQ ID NO: 10776 - protein, 320 aa, Vibrio vulnificus CMCP6
MIKKIGVLTSGGDAPGMNAAIRGVVRTALGAGLEVYGIYDGYLGLYEGRIKQLDRSSVSDVINRGGTFLGSARFPEFKEVAVREKAIENLKAHGIDALVVIGGDGSYMGAKKLTEMGYPCIGLPGTIDNDIAGTDYTIGYLTALNTVIESIDRLRDTSSSHQRISIVEIMGRHCGDLTLMSAIAGGCEYIITPETGLDKEKLIGNIQDGISKGKKHAIIALTELMMDANELAKEIEAGTGRETRATVLGHIQRGGRPTAFDRVLASRMGNYAVHLLMEGHGGRCVGIVKEQLVHHDIIDAIENMKRPVRNDLFKVAEELF

SEQ ID NO: 10777 - protein, 339 aa, Arabidopsis thaliana
MGEAVEVMFGNGFPEIHKATSPTQTLHSNQQDCHWYEETIDDDLKWSFALNSVLHQGTSEYQNIALLDTKRFGKVLVIDGKMQSAERDEFIYHECLIHPALLFHPNPKTVFIMGGGEGSAAREILKHTTIEKVVMCDIDQEVVDFCRRFLTVNSDAFCNKKLELVIKDAKAELEKREEKFDIIVGDLADPVEGGPCYQLYTKSFYQNILKPKLSPNGIFVTQAGPAGIFTHKEVFTSIYNTMKQVFKYVKAYTAHVPSFADTWGWVMASDHEFDVEVDEMDRRIEERVNGELMYLNAPSFVSAATLNKTISLALEKETEVYSEENARFIHGHGVAYRHI

SEQ ID NO: 10778 - protein, 252 aa, Triticum aestivum
  unsure (1)..(252): unsure at all Xaa locations
MMGYQKGVDIEAGTSGGTGTAAPTRGLYPGMTESPELRWALIRKIYVILSLQLLLTAVVAAVVVKVRAIPHFFVSSSAGLGLYIFLIIFPFIVLCPLYFYRQKHPVNLLLLGVFTVAISFAVGMTCAFTSGKVILEAAILTTVVVFSLTAYTFWAAKRGQDFSFLGPFLFASLIMLLVFGFIQILFPMGKLSHMIYGALAALIFSGYIVYDTDNIIKRYTYDEYVWAAVSLYLDVINLFLXALLTLFRAGDS

SEQ ID NO: 10779 - protein, 322 aa, Staphylococcus aureus subsp. aureus MRSA252
MKKIAVLTSGGDSPGMNAAVRAVVRTAIYNEIEVYGVYHGYQGLLNDDIHKLELGSVGDTIQRGGTFLYSARCPEFKEQEVRKVAIENLRKRGIEGLVVIGGDGSYRGAQRISEECKEIQTIGIPGTIDNDINGTDFTIGFDTALNTIIGLVDKIRDTASSHARTFIIEAMGRDCGDLALWAGLSVGAETIVVPEVKTDIKEIADKIEQGIKRGKKHSIVLVAEGCMTAQDCQKELSQFINVDNRVSVLGHVQRGGSPTGADRVLASRLGGYAVDLLMQGETAKGVGIKNNKIVATSFDEIFDGKDHKFDYSLYELANKLSI

SEQ ID NO: 10780 - protein, 549 aa, Triticum aestivum
MAAAATRRAASSLASRCLLARPAASPAAVPSALRRADGARGLLPGLLQRFGTAAAAEEPISPSVQVGETQLLINGKFVDAASGKTFPTVDPRTGEVIARVAEGDAEDVDRAVVAARKAFDEGPWPRMTAYERSRILLRFADLIEKHNDDIAALETWDNGKPYEQAAHIEVPMLARLMRYYAGWTDKIHGLIVPADGPHHVQVLHEPIGVVGQIIPWNFPLLMYGWKVGPALACGNTIVLKTAEQTPLSALYVSKLLHEAGLPEGVLNIVSGFGPTAGAALASHMDVDKIAFTGSTDTGKVILELSARSNLKPVTLELGGKSPFIVMDDADIDQAVELAHFALFFNQGQCCCAGSRTFVHERVYDEFVEKSKARALKRVVGDPFRKGVEQGPQIDDEQFKKILRYIKSGVDSGATLVTGGDKLGDKGYYIQPTIFSDVQDGMKIAQEEIFGPVQSIFKFNDLNEVIKRANASQYGLAAGVFTNNLDTANTLTRALRAGTVWVNCFDIFDAAIPFGGYKMSGIGREKGIDSLKNYLQVKAVVTALKNPAWL

SEQ ID NO: 10781 - protein, 339 aa, Arabidopsis thaliana
MGEAVEVMFGNGFPEIHKATSPTQTLHSNQQDCHWYEETIDDDLKWSFALNSVLHQGTSEYQDIALLDTKRFGKVLVIDGKMQSAERDEFIYHECLIHPALLFHPNPKTVFIMGGGEGSAAREILKHTTIEKVVMCDIDQEVVDFCRRFLTVNSDAFCNKKLELVIKDAKAELEKREEKFDIIVGDLADPVEGGPCYQLYTKSFYQNILKPKLSPNGIFVTQAGPAGIFTHKEVFTSIYSTMKQVFKYVKAYTAHVPSFADTWGWVMASDHEFDVEVDEMDRRIEERVNGELMYLNAPSFVSAATLNKTISLALEKETEVYSEENARFIHGHGVAYRHI

SEQ ID NO: 10782 - protein, 409 aa, Staphylococcus aureus subsp. aureus MRSA252
MSLRDEALEMHKRNQGKLEVKPNVKVTNKEELSLAYSPGVAEPCKDIYEDKRKVYDYTIKGNTVAVITDGTAVLGLGNIGPEASIPVMEGKAVLFKSFAGINGVPIALNTTDTEEIIKTVKLLEPNYGGINLEDISAPRCFEIEERLKKETNIPVFHDDQHGTAIVTMAGLVNALRVVNKDIAKIKVVLNGAGAAGIAIVKLLYAYGVRNMVMCDSRGAIFEGRSYGMNPTKDVVAKWTNKDKIEGSLEEVVKDADVFIGVSVANALSQDMVKSMADNPIIFAMANPNPEIIPDDAKAAGARVVGTGRSDYPNQINNVLAFPGIFRGALEVEATHINEEMKKAAVEAIADLIDSSELNEDYCIPGPFDKRVAPSVARNVAKAAMESGVARIEVDPQDVYDKTMKLTDLQ

SEQ ID NO: 10783 - protein, 488 aa, ASPERGILLUS NIDULANS FGSC A4
MAQVEVPSTNGSGKSVETRLFINGEFQPSSDGKTFSLIDPFTQNSVAEVSQATEEDTNNAVAAAKAAFPAWRDRSPADRGACLHKLAALIRENNEEFARLEALSTGRPVSRYFDATVSADTFSYFAEAGWTVQGTSSLNTPGHLNMTVKQPYGVVACIIPWNVPMAFFAFKVAPALAAGNTVVLKSSEKAPLTSALAATLIAEAGFPPGVINILSGFGTPAGSTLASHMDVRCLSFTGSSFTGQRIQAAAAASNMKIVHMELGGKSPALIFEDADLENAAQATQFSIQCLSGQTCMANSRIYVQESVADEFLALFKEKFGSAVLGNPLESGTTHGPQVDGLQYERVKSYITIGEQDGKLSMGGDAGNGYFVKPTVFEGVPEDSRIVKEEVFGPVVVINTFKTEEEAIKKANASEFGLYASVFTKDLDRAVRTSKLLEAGTVGVNTTSPNVAKDMPFGGYKMSGVGREGFMHSLDNFLETKTILIKMSS

SEQ ID NO: 10784 - protein, 339 aa, Arabidopsis thaliana
MGEAVEVMFGNGFPEILKATSPTQTLHSNQQDCHWYEETIDDDLKWSFALNSVLHQGTSEYQDIALLDTKRFGKVLVIDGKMQSAERDEFIYHECLIHPALLFHPNPKTVFIMGGGEGSAAREILKHTTIEKVVMCDIDQEVVDFCRRFLTVNSDAFCNKKLELVIKDAKAELEKREEKFDIIVGDLADPVEGGPCYQLYTKSFYQNILKPKLSPNGIFVTQAGPAGIFTHKEVFTSIYNTMKQVFKYVKAYTAHVPSLADTWGWVMASDHEFDVEVDEMDRRIEERVNGELMYLNAPSFVSAATLNKTISLALEKETEVYSEENARFIHGHGVAYRHI

SEQ ID NO: 10785 - protein, 112 aa, Bartonella clarridgeiae
ANETCLKMLQEIGTVQKIPEFIARAKDKNDRFRLMGFGHRVYKNYDPRAKIMQQTCHEVLKELNIQDDPLLDIAMELEKIALNDEYFIEKKLYPNVDFYSGITLKALGFPTE

SEQ ID NO: 10786 - protein, 435 aa, Burkholderia cepacia R18194
MSRQQQAQELQQQWESDPRWKGIKRSYTAEDVVRLRGSIPIEHTLAKRGAEKLWSLVNNEPFVNALGALTGNQAMQQVKAGLKAIYLSGWQVAGDANVAGEMYPDQSLYPANSVPLVVKRINNTLTRADQIQWSEGKNPGDEGYVDFFAPIVADAEAGFGGVLNAFELMKAMIESGASGVHFEDQLASVKKCGHMGGKVLVPTREAVAKLSAARLAADVMGTSTLLVARTDAEAADLITSDVDDNDKPFLTGERTVEGFFRTKPGIEQAISRGLAYAPYADLVWCETGKPDLEYAKKFAEAIHKQFPGKMLSYNCSPSFNWKKNLDDATIAKFQKELGAMGYKFQFITLAGFHALNYSMFNLAHGYARTQMSAFVELQQAEFAAADKGFTAVKHQREVGTGYFDAVTQTVEREASTTALHGSTEDEQFFDGKKVA

SEQ ID NO: 10787 - protein, 284 aa, Streptococcus agalactiae 2603V/R
MTDTMILNDNHKIPTLGLGTWMIDNDRVAQVVKDAIELGYRHIDTAQAYNNEKGVGVGIKESGITRESLFVTTKIAAEHKDYESATKSIDQSLEALGLDYIDLMIIHSPQPWKEWRETDKHFDQGNLEAWRALEDAQKSGKMKSIGVSNFLEKDLENILKNGHVKPAVNQILAHIGNTPFDLIDYCQSKGIQVEAYSPIAHGQALKSDGIQKMAEKYGVSVAQLCIQYLLQLNLIVLPKASSKEHLQSNLDFDFVISDEDMSILKSLMFDDYGEFSNFPVFSGK

SEQ ID NO: 10788 - protein, 257 aa, Triticum aestivum
  unsure (1)..(257): unsure at all Xaa locations
MSTTRVKRRVGKYELGRIRFAXNTETGDPVAIKILDKEKLLKHKMVEQIKREIATMKLIKHPNVVRIHEVMGSKTKIYIVLEYVTGGELFDTIVNHGRMREDEARRYFQQLINAVDYCHSRGVYHRDLKPENLLLDSCGNLKVSDFGLSALSQQLKDDGLLHTTCGTPIMLPRXNYVAPDVLEDQGYDGAMADLWSCGVILFVLLAGYLPFEDSNLMALYSSISRAAATFVTXSSFLRPRIQSKILDSNPIGSIAVQ

SEQ ID NO: 10789 - protein, 164 aa, Zea mays
KCGHMAGKVLVAVSEHVNRLVAARLQFDVMGVETVLVARTDAVAATLIQTNVDARDHQFIVGATNPGLRGQSLAAVLSAGMSAGKSGRELQGIEDEWLAAAQLKTFSECVRDAIAGLGVAAQEKQRRLQEWDRATGGYDRCVSNDQARDIAASLGVTSVFWDWD

SEQ ID NO: 10790 - protein, 231 aa, Zea mays
ADHDDDERDQPALHVLPDGDPERWHAQVFRSVDAGSVKRFPRPWERAEMARRHLVGDKNLAVERSIHAAYVAAIRSAERFVYVENQYFIGGSYAWPSYRNGGACNLVPMEIALKVASKVRAGEPFAAYVVLPMWPEGNPGSGPAQEILFWQNQTMEMMYSVVAAALEGKGGHPQEHLNFYCLGNREPAEDAGDGNKWAPADPLDDATTSSAAVRDCHCSGPRRSSFIQSFH

SEQ ID NO: 10791 - protein, 278 aa, Zea mays
PRVRYFWDVLLDADLESDILGWQYISGSLPDGHELSRLDNPEVQCQKYDPDGEYVRTWIPELARMPTEWIHSPWAAPNSILQVAGVELGFNYPKPIVELHMARECLDDAISTMWQLDTAAKLAELDGEVVDDNLNNIRNFDIPKVVLNKKLSPSTSSMEHRVLSTNGKDEKSQPTEVKALYKQIIRDDMMNDSNMDDTCSTANLKVTRKRSSSDSAFNVPSCSSSLVMESRIHHNEPSSVLYSGYFQKTADRDGTSKVEDNDSEDSGTSISRPSKKAA

SEQ ID NO: 10792 - protein, 460 aa, Yarrowia lipolytica
MCVDSCVQRSSLPHLSRPPGNLHKIINSDIYIYIKPHAPTPLLVAFAPTPHPSTTTSPFGQGLHQAHRQRVASLPTYGKTTTFNLPDNRPIKTVHCPSCEHVCRPQTQDAEAQKLQEAVTQRRRRSGAPGNSFPSAITALHPRQTHAPRERPSARQPDKPNGNRWELGVEFKIDIRAQDLRTIQELGAGNGGSVSRVEHIPTGAVMAKKVIHIGGKEAVRRQILRELHIMHECDSPYIVSFYGAFINESSGDVVMCMEFMDCGHLDRIYKKAGPLTEEIVGHITVAVVEGLTYLYNEHRIVHRDVKPSNILVNSHGQIKLCDFGVSGELINSIADTFVGTSTYMSPERIQGGNYTVKSDVWSLGISLLELLLGKFPFDMANGAVGPMGILDLLQRIVNEPPPTLPAEDTRFSPVCRRFVDRCLVKEPERPSPQQLHPTMPFIITSRAKQVDMKAWAMSVQ

SEQ ID NO: 10793 - protein, 271 aa, Pseudanabaena sp. PCC 7409
MNEETGIPDDNLLTIEQAIANLQSEDLGLRVYAAWWLGRFRVNVPEAIDLLIAALADEADRTEAGGYPLRRNAARALGKLGDRRAVPALITSLECDDFYVREAVAQSLEMLGDNSCVPYLIELIKNPNPEASADTEPEHPYDAFLEALGTLGAVKAIPHILPFLDHPIPKVQYAAARAMYQLSEPMVADQYGDRLVAALANDDLQLRRTVLSDLGAIGYLSAAEAIGNTMAENSLKLISLKGLLEKQIVLATPPDLTDGAIRVMALMDDLL

SEQ ID NO: 10794 - protein, 480 aa, GIBBERELLA ZEAE PH-1
MTRNKFSSLRDQLVQGKLLLPGDEGYDQSLERWSRTCVKPAAAVAQPRTAEEVSAVVKFATSNGIKFNVKGGGHSSSQTSSSPSPEGMVLDLSLMRDVSVDADAQTITYAGGCLWKDVDDALWAKGLATVGGTVSHTGVGGLTLHGGYGVLSGLHGLAIDNMIACQVVLADGSIVTASASENPDLFWALRGAGSSFGVVTQFTSKAHPQGDIWGGMVLFSPDKLPAIIDFTNTWGATNDGRQILLVAFGHAPPGPDPNAPRPPVVVVRMAQVGDNPSEEGPKYFAPILEMEALMQEIGPMPYPVINQVADGQVMHGSRYLFGGSNFTLPMKLSTAETIRNRFHEFTERTPDATESVVLIECIPNQKIREIPVESTAFNSRGKYFIIGFMYKYEDESLDTEIRQFNRTFQTEVRKLGYNDETLADGIGNYLNYANTGNISAEEAFGSHSKRLVTLKKKYDPENVFDKLWKLVGKVEDNWIA

SEQ ID NO: 10795 - protein, 331 aa, Thinopyrum intermedium
MKTFLVFCLLAVAATSAIAEMESNIIISFLKPWLQQPLPPQQTLPQQQQRPIQQQPQPYPQIPFPPQQPPFSQQQQPSFSQQQQPSFSQQQQPPFSQQQQPSFSQQQQPPFSQQQQSPFSQQQPPVSQQQPPFLQQQQPVLPQQPPFLQQQQLVLPQQQIPFVHPSVLQQLNPCKVFLQQLCSPVAMPQRLARSQMLQQSSCHVIQQQCCQQLPQIPQQSRYEAIRAIIYSIILQEQQQVQGSIQPQQQQPQQLGQCVSQPQQQSQQQLGQQPQQQQLAQVTFLQPHQIAQLEVMTSIALRTLPTMCSVNVPLYRTTTSVPFGVGTGVGAY

SEQ ID NO: 10796 - protein, 351 aa, Clostridium beijerinckii
MKGFAMLGINKLGWIEKERPVAGSYDAIVRPLAVSPCTSDIHTVFEGALGDRKNMILGHEAVGEVVEVGSEVKDFKPGDRVIVPCTTPDWRSLEVQAGFQQHSNGMLAGWKFSNFKDGVFGEYFHVNDADMNLAILPKDMPLENAVMITDMMTTGFHGAELADIEMGSSVVVIGIGAVGLMGIAGAKLRGAGRIIGVGSRPICVEAAKFYGATDILNYKNGHIEDQVMKLTNGKGVDRVIMAGGGSETLSQAVKMVKPGGIISNINYHGSGDALLIPRVEWGCGMAHKTIKGGLCPGGRLRAERLRDMVVYNRVDLSKLVTHVYHGFDHIEEALLLMKDKPKDLIKAVVIL

SEQ ID NO: 10797 - protein, 126 aa, Zea mays
YNHVLQVDYACTPEEVQQHFQACGTVNRVTILTDKFGQPKGFAYVEFLEQEGVQEALNLNESELHGRQIKVAPKRTNVPGMKQRPPRGYNPYHGYPYRSYGAPYFPPYGYGRAPRFRRPMRYRPYF

SEQ ID NO: 10798 - protein, 338 aa, Thinopyrum intermedium
MESNIIISFLKPWLQQPLPPQQTLPQQQQRPIQQQPQPYPQIPFPPQQPPFSQQQQPSFSRQQQPSFSQQQQPSFSQQQQPPFSQQQQPSFSQQQQPAFSQQQQPPFSQQQPPVSQQQQPVLPQQPPFSQQQQPVLPQQPPFSQQQQPVLPQQQIPFVHPSVLQQLNPCKVFLQQLCSPVAMMPQRLDRSQMLQQSSCHVMQQQCCQQLPQIPEQSRYEAIRAIIYSIILQEQQQGQGSIESQQQQPQQSGQGVSQPQQQSQLGQCAFQQPQLQQLGQQPQQQQAAHGTFLQPHQIAQLEVMTSIALRTLPTMCSVNVPLYGTTTSVPFGVGTGVSAY

SEQ ID NO: 10799 - protein, 293 aa, Hordeum vulgare subsp. spontaneum
MSPTLSLKLKKSSHTPQSSVSSSTMLRLFKKEAACQSPSTLPVAMDMGLEVSSSSPSSSSVSSSPEHAARRASPAKRPAGRTKFRETRHPVYRGVRRRGNTERWVCEVRVPGKRGARLWLGTYATAEVAARANDAAMLALGGRSAACLNFADSAWLLAVPSALSDLADVRRAAVEAVADFQRREAADGSLAIAVPKEASSGAPSLSPSSGSDSAGSTGTSEPSANGVFEGPVVMDSEMFRLDLFPEMDLGSYYMSLAEALLMDPPPTATIIHAYEDNGDGGADVRLWSYSVDM

SEQ ID NO: 10800 - protein, 191 aa, Paracoccidioides brasiliensis
MAEIRRKLVIVGDGACGKTCLLIVFSKGTFPEVYVPTVFENYVADVEVDGKHVELALWDTAGQEDYDRLRPLSYPDSHVILICFAIDSPDSLDNVQEKWISEVLHFCQGHPIILVGCKKDLRDDPRTIEELRKTSQKPVTTEQGEEVRKKIGAYKYLECSARTNDGVREVFESATRAALLAKKEKKKCKIL

SEQ ID NO: 10801 - protein, 177 aa, Lemna gibba
MASSMMASTAAVARAGPAQSSMVAPFNACRSSVAFPATRKANNNLSTLPGNGGRVSCMQVWPPEGLKKFETLSYLPPLSVEDLAKEVDYLLRNDWVPCIEFSKEGFVYRENHASPGYYDGRYWTMWKLPMFGCTDASQVIAEVEEAKKAYPEYFVRIIGFDNKRQVQCISFIAYKPT

SEQ ID NO: 10802 - protein, 110 aa, Triticum aestivum
MDSQFGAMERGGSRQRRSPVSARPNTAKRHLQQQRANAADKKVVIPNYFGVEAFFVLACLTVSLLILPLVLPPLPPPPSLLLFVPVCLLILLMVLAFMPTDVRSMATSYL

SEQ ID NO: 10803 - protein, 379 aa, Bdellovibrio bacteriovorus HD100
MAEVNIYEGALDKGLEGVVACTTKVSFIVGDSLNFRGYTIDDLAANSTFEEVTYLLWNDKLPNAQELAAFSTQLRNEMALSPDFIKVLKAIPTNVHPMGWLRTAVSLMAHWDSDANDNGAEANLRKSVRLTAKMGTLLCAFDAIRKGKEPVAPKADKSMAWNMMYMLGGGAEPKAEHVKVMDTCLILHADHELNCSAFATRVTASSLSDLHSAIVSAIGALKGPLHGGANEQVILMLQKIGTMEKAQQFVKDALAAKEKVMGIGHRVYKNGDPRARILRGMSDKLTKDAGIHHMYEMSTLIDDTMFNEKGLMPNVDFYSATVYFSMGIPTDLFTPIFAASRISGWCAHAFEQYANNRIYRPRGKWAGKEGLKWTPANQR

SEQ ID NO: 10804 - protein, 421 aa, Spinacia oleracea
MTDRLAMASFTTTTAAAASRLLPSSSSSISRLSLSSSSSSSSSLKCLRSSPLVSHLFLRQRGGSAYVTKTRFSTKCYASDPAQLKNAREDIKELLQSKFCHPIMVRLGWHDAGTYNKDIKEWPQRGGANGSLSFDVELKHGANAGLVNALKLLQPIKDKYSGVTYADLFQLASATAIEEAGGPTIPMKYGRVDATGPEQCPEEGRLPDAGPPSPAQHLRDVFYRMGLDDKDIVALSGAHTLGRSRPERSGWGKPETKYTKDGPGAPGGQSWTAEWLKFDNSYFKDIKEKRDADLLVLPTDAALFEDPSFKVYAEKYAADQEAFFKDYAEAHAKLSNQGAKFDPAEGITLNGTPAGAAPEKFVAAKYSSNKRSELSDSMKEKIRAEYEGFGGSPNKPLPTNYFLNIMIVIGVLAVLSYLAGN

SEQ ID NO: 10805 - protein, 201 aa, Zea mays
  unsure (1)..(201): unsure at all Xaa locations
MKPPSLVHCFKLLVLLALARLTMHVPDEDMLSPLGALRLDGHFSFHDVSAMARDFGNQCSFLPAAVLHPGSVSDIAATVRHVFSLGEGSPLTVAARGHGHSLMGQSQAAQGIVVRMESLRGARLQVHDGFVDAPGGELWINVLRETLKHGLXAPQSWTDYXHLTVGGTCXNAXVSGQAFRHXPQXRGDVVTCSPEXNSDLF

SEQ ID NO: 10806 - protein, 203 aa, GIBBERELLA ZEAE PH-1
MAQAGGSYNNPLKKFKLVFLGEQSVGKTSLITRFMYDSFDNMYQATIGIDFLSKDRTVRLQLWDTAGQERFRSLIPSYIRDSSVAVVVYDISNAKSFQNTKKWIDDVRAERGNDVIIVLVGNKTDLNEKREVTTQQGEEEAKKNNLMFVETSAKLGHNVKNLFKRIAQALPGMEGSDAAAQASNQMIDVKTNNTQQSQEGCAC

SEQ ID NO: 10807 - protein, 339 aa, Arabidopsis thaliana
MGEAVEVMFGNGFPEILKATSPTQTLHSNQQDCHWYEETIDDDLKWSFALNSVLHQGTSEYQDIALLDTKRFGKVLVIDGKMQSAERDEFIYHECLIHPALLFHPNPKTVFIMGGGEGSAAREILKHTTIEKVVMCDIDQEVVDFCRRFLTVNSDAFCNKKLELVIKDAKAELEKREEKFDIIVGDLADPVEGGPCYQLYTKSFYQNILKPKLSPNGIFVTQAGPAGIFTHKEVFTSIYNTMKQVFKYVKAYTAHVPSFADTWGWVMASDHEFDVEVDEMDRRIEERVNGELMYLNAPSFVSAATLNKTISLALEKETEVYSEENARFIHGHGVAYRHI

SEQ ID NO: 10808 - protein, 112 aa, Bartonella sp. sh6833ga
ANEACLKMLQEIGSVKRIPEFIARAKDKNDPFRLMGFGHRVYKNYDPRAKIMQKTCHEVLKELNIQDDPLLDIAIELEKIALNDEYFGEKKLYPNVDFYSGITLKALGFPTE

SEQ ID NO: 10809 - protein, 479 aa, Caulobacter crescentus CB15
MREYTKFYIDGAWVDPAAPNTLDVINPATEEVCGVISMGSEADVDKAVRAARKAFASFSQTSREERIDILERIIAEYQKRFEDMAKAITEEMGAPAWLAQRAQAAMGIGHVQTAAAVLKGYKFEEDRGTTRIVKEPIGVCAFITPWNWPVNQIACKVGPAIATGCTMVLKPSEIAPFSGYIWTEIMHAAGVPAGVFNLVNGDGPTVGAALSRHPEVDMVSFTGSTRAGIEVAKNAAPTVKRVHQELGGKSPNIILDDADFSRAVAGGVASVMMNSGQSCNAPTRMLVPGARMDEVIAIAKAAAESHTVGDPNGNHKMGPVVSETQWNKIQGLIQKGIDEGATLVTGGVGRPEGLDKGYYVKPTVFANVTNEMTIAKEEIFGPVVSILGYDTVDEAVTVGNDTEYGLAAYVSGGDQDEVRKVASRLRAGQVTLNGAGPDLMAPFGGYKMSGNGREWGDHAFGEFLETKAILGYSAKVAAE

SEQ ID NO: 10810 - protein, 339 aa, Arabis gemmifera
MGEAVEIMFGNGFPEIHKDTSPIQTLHSNQQDCHWYEETIDDDLKWSFALNSVLHQGTSEYQDIALLDTKRFGKVLVIDGKMQSAERDEFIYHECLIHPALLFHPNPKTVFIMGGGEGSAAREILKHTTIEKVVMCDIDQEVVDFCRRFLTVNSDAFCNKKLELVIKDAKAELEKREEKFDIIVGDLADPVEGGPCYQLYTKSFYQNILKPKLSPNGIFVTQAGPAGIFTHKEVFTSIYNTMKQVFKYVKAYTAHVPSFADTWGWVMASDHEFDVEVDEMDRRIEERVKGELMYLNAPSFVSAATLNKTISLALEKETEVYSEENARFIHGHGVAYRHI

SEQ ID NO: 10811 - protein, 418 aa, Mycobacterium bovis AF2122/97
MASGSGLCKTTSNFIWGQLLLLGEGIPDPGDIFNTGSSLFKQISDKMGLAIPGTNWIGQAAEAYLNQNIAQQLRAQVMGDLDKLTGNMISNQAKYVSDTRDVLRAMKKMIDGVYKVCKGLEKIPLLGHLWSWELAIPMSGIAMAVVGGALLYLTIMTLMNATNLRGILGRLIEMLTTLPKFPGLPGLPSLPDIIDGLWPPKLPDIPIPGLPDIPGLPDFKWPPTPGSPLFPDLPSFPGFPGFPSLPGFPGLPGFPEFPAIPGFPALPGLPSIPNLFPGLPGLGDLLPGVGDLGKLPTWTELAALPDFLGGFAGLPSLGFGNLLSFASLPTVGQVTATMGQLQQLVAAGGGPSQLASMGSQQAQLISSQAQQGGQQHATLVSDKKEDEEGAAAGVAEAERAPIDAGTAASQRGQEGTVL

SEQ ID NO: 10812 - protein, 484 aa, Bordetella bronchiseptica RB50
MENLGYPARLELYVAGQWRGVEGRRTQVVVNPSTQQPLGELPLASVEDIDDALAAADQAFGDWARTTAWERADILQRAAALIEARRDRLAVVLTLENGKPLADSHGELDRVVETILWCAEEGKRTYGRVLPARAQRLSQSSLKRPVGPVAAFVPWNFPAVLAARKLAAAMAAGCTVVLKPAEETPAICIELVRAFVDAGTPAGVVNLLYGVPAQVSERLIASPIIRKVSFTGSVAVGRLLASMAAGHLKPATMELGGHAPVVVFDDVDADRVAKMCVGFKYRNAGQVCLSPSRFYVHERIADRFAESFVRHAGLLRVGDGMEEGVQMGPLNNVRRLQAAERLVEQAVGAGASLALGGRRIGQRGYFYPPTVLEGVPDAADILAEEPFCPVAPIMRFGSMDEVIGRANHPSLGLAAYAFTNRMATSAEFAERIEAGWIGINNFVPALADAPIGGMKDSGLGYEGGPEGLDAYLHARFVSQLNVEV

SEQ ID NO: 10813 - protein, 361 aa, Zea mays
AHTPDAFAPRIPLAGGRLYQPGRCWEDVFDAISNARHLIYITGWSVYTEITLLRDGSRPRPGGEATLGELLKRKASEGVRVLMLVWDDRTSVESLGMKWGFMSTHDAETAEYFRGSGVHCVLCPRNPDAGSSAVMGAQIAYMITHHQKIVVVDHEMPAKRSDRRRILSFVGGLDLCDGRYDTQFHSLFRTLDTAHHKDFHQPNLAGASIDNGGPREPWHDIHSKIEGPAAWDVLYNFEQRWRKQGGGIDLLVNLKAMADLIIPPSPVMFPEDQDSWNVQLFRSIDGGACFGFPSTPEAAAQSGLVSGKNNVLDRSIHDAYIHAIRRAKHFIYIENQYFLGSSFAWKADGIKPEEIEALHLV

SEQ ID NO: 10814 - protein, 202 aa, Neurospora crassa
MSDSPQSNSKDVEQGAPSPGEEPQMNDPQDPHSSGLNQYEFEVKEQDRWLPIANVARIMKNALPENAKIAKEAKECMQECVSEFISFITSEASEKCQQEKRKTVNGEDILFAMTSLGFENYAEALKIYLSKYREQQNQTNRSENQQNRPSSQGYGAPQGQNQPGQGGFSSNDLGGQQESGDASGYNLYGAQTGHNGGGAEGY

SEQ ID NO: 10815 - protein, 321 aa, Thinopyrum intermedium
MESNIIISFLEPWLQQPLPPQQTLPQQQQRPIQQQPQPYPQIPFPPQQPPFSQQQQPPFSQQQQPPFSQQQQPSFSQQQQPPFSQQQQPPFSQQQPPVSQQQQPVLLQQPPFSQQQQPVLPQQPPFSQQQQPVLPQQQIPFVHPSVLQQLNPCKVFLQQLCSPVAMPQRLARSQMLQQSSCHVMQQQRCQQLLQIPEQSRYEAIRAIIYSIILQEQQQGQGSIESQQQQPQQSGQGVSQPQQQSQLGQCAFQQPQLQQLGQQPQQQLAAHGTFLQPHQIAQLEVMTSIALRTLPTMCSVNVPLYGTTTSVPFRVGTGVSAY

SEQ ID NO: 10816 - protein, 125 aa, Triticum aestivum
  unsure (1)..(125): unsure at all Xaa locations
YFHLPIREASRTXKIGLSIXKKKCRQYGIPRWPHRKLKSLDSXIHDLEYVIXDETERDGVKQEDHMQDEKENQDAIEALAKRKRMLETEKATIQQKPTLDLMAETKQFRQYVFKRKYRAKTLVSE

SEQ ID NO: 10817 - protein, 165 aa, Triticum timopheevii subsp. armeniacum
VMASSATTVAPFQGLKSTAGLPVSRRSSGSLGRVSNGGRIRCMQVWPIEGIKKFETLSYLPPLSTEALLKQVDYLIRSKWVPCLEFSKVGFVFREHNSSPGYYDGRYWTMWKLPMFGCTDATQVLSEVEEVKKEYPDAYVRVIGFDNLRQVQCVSFIAFRPPGCE

SEQ ID NO: 10818 - protein, 174 aa, Gloeobacter violaceus PCC 7421
MGKGVTLWFTGLSGAGKSTISGIVAKKLQEIGRNVEVLDGDEVRLNLSAGLSFSKADRDTNVRRIGYVCRLLSRNGVIAISAAISPYRNTREELRANIIDFLEIFVDCPLDVCIERDVKGLYAKALKGEIPAFTGVSDPYEAPANPDLTILTNTESKDESANRVVQLLYERGYL

SEQ ID NO: 10819 - protein, 513 aa, Glycine max
MHTLLRSTLRTKTASSLAYAVVSRSAHENLLQAPLLSRSNSTEASLAKDNSSNDVKNGQGYKGHSMLAPFTAGWQSSDLHPLIIEKSEGSYVYDINGKKYLDALAGLWATSLGGSEPRLVDAAVAQLKKLPFYHSFWNRTTLPSLDLAKELLEMFTARKMGKAFFVNSGSEANDTQVKLVWYYNNALGRPDKKKFIARAKSYHGSTLIAASLSGLPALHQKFDLPAPFVLHTDCPHYWRYHLPGETEEEFSTRLANNLEQLILKEGPETIAAFIAEPVMGAGGVIPPPSTYFEKVQAVVKKYDILFIADEVICAFGRLGTMFGCDKYNIKPDLVSLAKALSSAYLPIGAVLVSPEISEVIHDQSNKLGSFSHGFTYSGHPAACAVAIEALKIYKERNIVDQVNKIAPRFQDGIKAFSDSPIIGEIRGTGLILGTEFTDNKSPNDPFPPEWGIGAYFGAQCEKHGMLVRVAGDNIMMSPPYIISPGEVEELISIYGKALKETEKKVQELKSQRK

SEQ ID NO: 10820 - protein, 165 aa, Triticum aestivum
VMASSATTVAPFQGLKSTAGLPVSRRSSGSLGRVSNGGRIRCMQVWPIEGIKKFETLSYLPPLSTEALLKQVDYLIRSKWVPCLEFSKVGFVFREHNSSPGYYDGRYWTMWKLPMFGCTDATQVLNEVEEVKKEYPDAYVRVIGFDNLRQVQCVSFIAFRPPGCE

SEQ ID NO: 10821 - protein, 112 aa, Triticum aestivum
  unsure (1)..(112): unsure at all Xaa locations
MAPTVMASSATSVAPFQGLKSTAGLPVSRRSNGASLGSVSNGGRIRCMQVWPIEGIKKFETLSYLPPLSTEALLKQVDYLIRSKWVPCLEXFNKVGFIFREXHNASPGYRWG

SEQ ID NO: 10822 - protein, 335 aa, Prochlorococcus marinus subsp. marinus str. CCMP1375
MTSLLDQLSSMTVVVADTGDLEAIRTFKPQDATTNPSLILAAAQIPAYQNLIDKSLQASRQRVGSFASAKEVVDEALDEVCVTFGKEILKIIPGRVSTEVDARLSFNTQATINKARKIIDLYKKVDISKERVLIKVASTWEGIKAAEVLESEGIHCNLTLLFGFSQAVACAEAGVTLISPFVGRILDWYKAETGKDSYAGEEDPGVVSVTKIFNYYKSNNYKTEVMGASFRNIDEILELAGCDLLTIAPKFLEQLENSDSKLTRKLDSLKPLPSETKIHLEEYDFRNMLKLDRMATEKLEEGIINFSKAIEQLEQLLSKRLSYIESGSNAELSIA

SEQ ID NO: 10823 - protein, 165 aa, Secale cereale
MMASSATTVAPFQGLKSTAGLPVSRRSSGSLGNVSNGGRIRCMQVWPIEGIKKFETLSYLPPLSTEALLKQVDYLIRSKWVPCLEFSKVGFVFREHNSSPGYYDGRYWTMWKLPMFGCTDATQVLNEVEEVKKEYPDAYVRVIGFDNLRQVQCVSFIAFRPPGCE

SEQ ID NO: 10824 - protein, 277 aa, Brassica napus
STHASGTPYTSCGTPNYVAPEVLNDGGYDGATADMWSCGVILYVLLAGYLPFDDSNLMNLYKKISSGEFNCPPWLSLGAMKLITRILDPNPMTRVTPQEVFEDEWFKKDYKPPVFEEKDDSNMDDVDAVFKDSEEHHVTEKKEEQPAAINAFEIISMSRGLNLENLFDPEQEFKRETRITLRGGANEIIDKIEEAAKPLGFDVQKKNYKMRLENVKAGRKGNLNVATEIFQVAPSLHMVQVSKSKGDTLEFHKFYKKLSNSLENVVWTNNEVKKAGK

SEQ ID NO: 10825 - protein, 163 aa, Zea mays
MDAVMFGLETPLMAALQHLLDVPDGDAGAGGDSDNKTGGGATRTYVRDARAMAATPADVKELPGAYAFVVDMPGLGTGDIRVQVEDERVLVVSGERRREEREDAKYLRMERRMGKFMRKFVLPDNADVDKVAAVCRDGVLTVTVEKLPPPEPKKPKTIEVKVA

SEQ ID NO: 10826 - protein, 59 aa, Brassica napus
EKFARSLRLSLREVKLSEGYYVMDPEQAVEMVDENTICVAAILGSTLNGEFEDVKLLNE

SEQ ID NO: 10827 - protein, 328 aa, Zea mays
HASGKIGPAIATGNTVIIKTAEQTPLSGLYASKLIVEAGFPPGVINVISGFGRTAGAAISSHMDIDKVAFTGSTLVGRMILQAAAKSNLKKVTLELGGKSPNIVFDDADIDNAISWSNFGIFFNHGQCCCAGSRLLVQEGIYDKFIERFKERAAKNQLGNPFAKDTFQGPQVSQLQFDRIMEYINHGKKEGATVALGGERHGTEGYFIQPTVFTDVTPNMKIAQEEIFGPVIAVTKFKDEAEAIKIGNSTSYGLAAAVHTKNVNTAIRVSNALKAGTVWINNYNMISYQAPFGGFKESGLGRELGSYALDNYTQVKTVHYRLGDALFG

SEQ ID NO: 10828 - protein, 255 aa, Brassica napus
GDIHGQYQDLLRLFEYGGYPPSANFLFLGDYVDRGKQSLETICLLLAYKIRYPSKIYLLRGNHEDAKINRIYGFYDECKRRFNVRLWKIFTDCFNCLPVAALIDDKILCMHGGLSPELDNLNQIREIQRPTEIPDSGLLCDLLWSDPDQKIEGWADSDRGISCTFGADKVAEFLDKNDLDLICRGHQVVEDGYEFFAKRRLVTIFSAPNYGGEFDNAGALLSVDESLVCSFEIMKPALASSSGHPLKKVPKMGKS

SEQ ID NO: 10829 - protein, 112 aa, Bartonella sp. sh7768ga
ANEACLKMLQEIGSVKKIPEFIARAKDKNDPFRLMGFGHRVYKNYDPRAKIMQKTCHEVLKELNRQDDPLLDIAIELEKIALNDEYFVEKKLYPNVDFYSGITLKALGFPTE

SEQ ID NO: 10830 - protein, 207 aa, Magnaporthe grisea 70-15
MTVMAGGALASRHLPASPRPAGRRAAPSSRRPHSTFVTWRESQLTPAAAEKGEETPLADYKGKVVLVVNTASKCGFTPQYAGLEALYKKITEKHPEDFTILGFPCNQFGGQEPGTDDDIQNFCQVNYGVTFPIMKKVDVNGDNADPLFKWLKEEMPGIMGLKRVKWNFEKFLIGRDGKVKGRWASTTKPESLEKDILKEIEAPKPSI

SEQ ID NO: 10831 - protein, 459 aa, Pseudomonas putida KT2440
MSTHSSTVQNDLAALIHPNTNLAQHREVGPLVIARGDGVRVFDEQGNAYIEAMSGLWSAALGFSEQRLVDAAVEQFKQLPYYHSFSHKTNAPAAALAAKLAALAPGDLNHVFFTNSGSEANDSVVKMVWYVNNALGRPAKKKFISRQQAYHGATVAAASLTGIPSMHRDFDLPAIPVHHLTCPNFYRFARPGESQEAFTVRLANELERYILAEGPETIAAFIGEPVIAAGGVIPPPTGYWAAIQAVCKRYDILVVIDEIITGFGRLGTMFGSQLYGIQPDIMVLSKQLTSSYQPLAAVVVSDAMNDVLVSQSQRLGAFAHGLTCTGHPVATAVALENIRIIEERDLVGHVQHLAPVFQRHLRAFEDHPLVGNVRGVGLMGGIELVADKATRQPFAQPGTLGGYVFKQAHKHGLIIRAIYDTIAFCPPLITTQDDIEAIFSAFERTLADATDWARSQHLL

SEQ ID NO: 10832 - protein, 474 aa, Pseudomonas putida KT2440
MQTKLLINGALVAGEGDHVDVYNPSLGRVLVQTHEASHAQVHAAVQSADAAFEAWSQTPPKDRAALLLTLADRIDAQAAVFARLEADNCGKPFTAVLQDELPAVSDVFRFFAGAVRCLQGSAAGEYIPGHTSMIRRDAVGVVASIAPWNYPLLMAAWKLGPALAGGNTVVLKPSEHTPMSTLKLGELLADIFPAGVVNIVHGRGATVGEPLTSHALVRMVSLTGSVRTGSRIIEGTADSVKRMHMELGGKAPVLIFDDADIDAAVEGIRAFGFYNAGQDCTAACRLYVQKAVYPEFVRKLGEAVSSIKCGLQDDPATEMGPLITQEHLQRVEGFVNRAREQPHIEVVTGGKRAAGAGFFFEPTVLAGTRQEDEVVCREIFGPVVTVSPFEDEAQVLAWANESDYGLASSVWTADVGRAHRLAARLQYGCTWVNTHFMLVSEMPHGGVKLSGYGKDLSMYGLEDYTLVRHVMFKH

SEQ ID NO: 10833 - protein, 407 aa, Moorella thermoacetica ATCC 39073
MSIQERALNLHREWQGKIETRPRVQVRNADDLTMAYTPGVAEPCKEIHKDPNLVDVYTRRWNLVAVVSDGSAVLGLGNIGARAAMPVMEGKSVLFKSFAGVDAFPICIDSQDVDEIVRTVQLLTPTFGGVNLEDIAAPRCFEIERRLKETTDIPIFHDDQHGTAVVVLSAIINACKITKRELSDLKVVINGAGAAGIACGKLLVDVGVSDVILCDSKGIICSKRDDLNAIKKEMLQITNKEDRCGTLADAMEGANCFIGLSVKDAVTPEMVRSMDKDSILFAMANPVPEILPDVARAAGAAVVGTGRSDFPNQVNNVLGFPGIFRGALDVKASDINDAMKIAAAHALADLVGDRLSADFVMPEAFDPRVAPAVAMAVARAAIESGVARDPKDPEWVKRHTEELIARQ

SEQ ID NO: 10834 - protein, 358 aa, Glycine max
MMSCKENEEDDTYLSALTLCFSRIFPAILNAAVDLNLFDIIDKAESSTLSASEIASLLLPNPHPQLANRLERILPVLASYSLLNCSIRTTEDGVRERLYALSPIGQYFASDDDGGSLGPLSSLFHRGYFHVLKDVKDAIMDPNNNDHFQNVHGMPPYQYMKTDEELNKLFNKALAQTGPPAMKMLLKLYKGFEQVSTLVDVGGGVGETLKQIIFEYPSIKGINFDLPQVVQDAPPYPGIEHVEGDMFESVPKGDAILLKLVCHNWLDEDCVKFLRNCHKALPQHGKVIVIDYIIPEVPDSSKISMQTCVADSLMFLVTSGKERTEKEFESLCRNSGFSRFHVACRDSPSVLSVIEFYK

SEQ ID NO: 10835 - protein, 69 aa, Brassica napus
MGGCVSTPKSCVGSKMRSKRRKSRKRRKLQRKRAAGSFDNLDHPPNNLPTPSFRASGEEAWFESNAAFE

SEQ ID NO: 10836 - protein, 459 aa, Oryza sativa
MESSNLGGGGGGGGGGGPPPFLIKTYEMVEDAATNHVVSCGPGGASFVVWNPLDFSRDLLPKYFKHNNFSSFIRQLNTYGFRKIDPERWEFANEDFIRGHTHLLKNIHRRKPVHSHSLQNQINGPLAESERRELEEEINRLKYEKSILVADLQRQNQQQYVINWQMQAMEGRLVAMEQRQKNIVASLCEMLQRRGGAVSSSLLESDHFSKKRRVPKMDLFVDDCAAGEEQKVFQFQGIGTDAPAMPPVLPVTNGEAFDRVELSLVSLEKLFQRANDACTAAEEMYSHGHGGTEPSTAICPEEMNTAPMETGIDLQLPASLHPSSPNTGNAHLHLSTELTESPGFVQSPELPMAEIREDIHVTRYPTQADVNSEIASSTDTSQDGTSETEASHGPTNDVFWERFLTETPRSCLDESERQESPKDDVKAELGCNGFHHREKVDQITEQMGHLASAEQTLHT

SEQ ID NO: 10837 - protein, 467 aa, Streptomyces sp. JP95
MLRDDLTGELVLPSDPGYRLAKQVQNTEYDAISPRAIAYCTSPDDVLACVRHAREAGIPAHVRGAGHSFNGWSTGTGLVIDLSRMNHAAADGPTVSIGAGIQSLDALDALKRHDRQIITGTFPTVGQGGFLSGGGLGWQTRKFGVASDRIVSARVVLADGRAVVASADEHPDLFWALRGGGGGNFGIVTAFELRPVDAPHLTAFETLWSFDDAADVLTAWQSWAAGESDDLGTSLVVLPGMFGPGGRPVVKVWGVHHGAAEELERALDALTDLAGVKPAHRETTATGPYADVMHEALCGSKTVQQCHRTGTGPEAVGHRHPYTRQAYRLTGRPVTRAEAESLLRAWEPDLDAEHYLLCIALGGAANRVGRTETAYVHRDARFLTGYQIATRDPEAVARGPVELDAWADRCAEALAPLATGSYINFPDSRTPPDWEADHYGENAARLRAVKRAYDPDGFFRHGRSIGS

SEQ ID NO: 10838 - protein, 386 aa, Triticum aestivum/Thinopyrum intermedium alien addition line
MESNIIISFLKPWLQQPLPPQQTLPQQLQQPVQQQPQQYPQIPFPPQQPPCSQQQQPPCSHEQQPSFSQQQQPSFSQQQQPPLLQQQQSPFLQQQQPSFPQQQPLVSQQQQPVLPQQPPFSQQQQTVLPQQPPFLQQQQPPFSQQQPPVSQQQQPVLPQQPPFSQQQQPVLPQRPPFSQQRQPVLPQQPPFSQQQQLVLLQQQIPFVHPSVLQQLNPCKVFLQQQCSPVAMPQRLARSQMLQQSSCHVMQQQCCQRLPQIPEQSRYEAIRAIIYSIILQEQQQGQGSVESQQQQPQQSGQGVSQPQQQSQLGQCAFQQPQLQQLGQQLQQQQAPHGTFLQPHQIAQLGVMTSIALRTLPTMCGVNVPLYGTTTSVPFGFGTGVGAY

SEQ ID NO: 10839 - protein, 165 aa, Hordeum vulgare subsp. vulgare
VMASSATTVAPFQGLKSTAGLPVSRRSSASLGSVSNGGRIRCMQVWPIEGIKKFETLSYLPPLTTEALLKQVDYLIRSKWVPCLEFSKVGFVFREHNSSPGYYDGRYWTMWKLPMFGCTDATQVLNEVEEVKKEYPDAYVRIIGFDNLRQVQCVSFIAFRPPGCE

SEQ ID NO: 10840 - protein, 150 aa, Chlamydia trachomatis D/UW-3/CX
MQLTSQAFSYGRPIPKKYSCQGVGISPPLSFSDVPREAKSLVLIVEDPDVPPSVREDGLWIHWIVYNLSPVVSNLAEGAQIFAVQGLNTAGEIGYCPPCPPDAKHRYYFYAYALDVVLSDEEGVTKEQLLEAMDGHIIATAELMGTYEKD

SEQ ID NO: 10841 - protein, 229 aa, Glycine max
  unsure (1)..(229): unsure at all Xaa locations
MWMILLRKRQVVVVVVLSLLQCSVRVDSVFCFSVQVVVHKNSPRETHFRRAGPRQKVYFESEDVYACIVTCGGLCPGVNTVIREIVCGLYHMYGVHKVLGIEGGYRGFYSCNTIPLTPKVVNDIHKRGGTILGTSQGEGGNDTLKIVDSIQDRGINQVYILGGDGTQRGASVIFEEIRRRGLKGSVVGIPESVDNDIPVIDKSXFXFDTAGEEAQRAINAAHVEAESTE

SEQ ID NO: 10842 - protein, 482 aa, GIBBERELLA ZEAE PH-1
MPPPQLRGFGGGPAVAAPYHQGGFPSHGQPQGGMPGANQYMNANAQLGPFSANGNAFTSGLNSLNTQGFADTGFGSQSARMGFHGPAAALQQSQHGLHQNMLMEHPTIRSQPNKGRIREVWKHNLHEEMAVLRDLVDKYPYIAMDTEFPGVVSRPMGGFRGKSDYHYQCLRTNVDMLKVIQIGLTFFNEDGETPPARPTNDLKLGTAAQKAATNAPFPCSWQFNFKFSITDDMYNEKSIESLQQAGINFELLDRDGIDPHEFASLLIPSGLVCFDNVRWISFHGGYDFGYLTKLLICLPLPNDEVDFDHKMKLYFPTTYDVKHLMKHAIRLHNSGLLTPSDPSSAEILQKFEHKSGLENIAETLKIKRVGSAHQAGSDSLLTGKVFFSMRDKIFAGDIPDEHVGKVWGLGFPDSNSNIISMNQQNNNDGQTNGNAPSTPNTTSVGLATTPGPQGHNGILNTGPMTPGGGGGVFGSFAFGGNR

SEQ ID NO: 10843 - protein, 444 aa, Glycine max
MESKPHVLMQRYELGRLLGQGTFGKVYYARSTITNQSVAIKVIDKDKVMRTGQAEQIKREISVMRLARHPNIIQLFEVLANKSKIYFVIEYAKGGELFNKVAKGKLKEDVAHKYFKQLISAVDYCHSRGVYHRDIKPENILLDENGNLKVSDFGLSALVDSKRQDGLLHTPCGTPAYVAPEVIKRKGYDGYLPFHDPNLIEMYRKISKAELKCPNWFPPEVCELLGMMLNPNPETRIPISTIRENSWFKKGQNIKNKRPVVENNTVSSSSTVLLDQNDCDGLAAEANGESVVPLSINAFDIISRSVGFDLSRFFDESFKKKEARFSSRLPANVIISKLEDIANQLRMKIKKKAAGLLKLESLNEGRKGVLSIDAEIFEVTPCFHMVEVKKSNGDTLEYQKILKEDIRPALQDIVWVWQSDQQLQSQQSEQQQQTDDQQQQQPQS

SEQ ID NO: 10844 - protein, 302 aa, Zea mays
  unsure (1)..(302): unsure at all Xaa locations
MVIRSFATTSLIAAFFAIAHLAAWVTPPQAAATAAPPSSPDTASFLRCLGAHLPPQAVYTNASRSYTSVLESSIKNLLFVTPATPTPVAIVXPATRPTSQAAVRCGARHGVGVRPRSGGHDYEGLSYRSLSARRPFAVVDLARLRAVSVDARNRTAWVGSGATLGELYYAIASRSARLGFPGGVGPTVGVGGHLSGGGFGLLLRKHGLAADHVVDAVVVDAAGSLRDRAAMGEDLFWAIRGGGGGSFGVVLSWKLRLVRVPPVVAVSTVHRPRNQSASALLARWQHVAPALPRDAILRVVLQ

SEQ ID NO: 10845 - protein, 293 aa, Hordeum vulgare subsp. spontaneum
MSPTLSLKLKKSSHTPQSSVSSSTKLRLFKKEAACQSPSTLPVAMDMGLEVSSSSPSSSSVSSSPEHAARRASPAKRPAGRTKFRETRHPVYRGVRRRRNTERWVCEVRVPGKRGARLWLGTYATAEVAARANDAAMLALGGRSAACLNFADSAWLLAVPSALSDLADVRRAAVEAVADFQRREAADGSLAIAVAKEASSGAPSLSPSSGSDSAGSTGTSEPSANGVFEGPVVMDSEMFRLDLFPEMDLGSYYMSLAEALLMDPPPTATIIHAYEDNGDGGADVRLWSYSVDM

SEQ ID NO: 10846 - protein, 165 aa, Avena sativa
VTASSATSVAPFQGLKSTAGLPVGRRSNAGLGNVSNGGRIRCMQVWPIEGIKKFETLSYLPPLSEEALLKQIDFLIRSKWVPCLEFSKVGFIFREHGSTPGYYDGRYWTMWKLPMFGCTDASQVIKEVEEVKKEYPDAYVRIIGFDNIRQVQCVSFIAFKPPGCE

SEQ ID NO: 10847 - protein, 584 aa, Glycine max
  unsure (1)..(584): unsure at all Xaa locations
MCGILAVLGCSDDSRAKRVRVLEXLSRRLKHRGPDWSGLHQHGDCFLAHQRLAIVDPASGDQPLFNEDKSVIVTVNGEIYNHEELRKQLPNHKFRTGCDCDVIAHLYEEHGEDFVDMLDGIFSFVLLDTRDNSFIVARDAIGVTSLYIGWGLDGSVWISSEMKGLNDDCEHFECFPPGHLYSSKERGFRRWYNPPWFSEATPSTPYDPLVLRHTFEQAVIKRLMTDVPFGVLLSGGLDSSLVASVTSRYLANTKAAEQWGXKLHSFCVGLEGSPDLKAAKEVADYLGTVHHEFTFTVQDGIDAIEDVIYHVETYDVTTIRASTPMFLMSRKIKSLGVKWVISGEGSDEIFGGYLYFHKAPNKEEFHRETCRKIKALHQYDCLRANKSTFAWGLEARVPFLDKAFINTAMSIDPESKMIKRDEGRIEKWILRRAFDDEEHPYLPKHILYRQKEQFSDGVGYSWIDGLKAHAAKHVTDKMMLNAGNIYPHNTPTTKEAYYYRMIFERFFPQNSARLTVPGGASVACSTAXKAVEWDAAWSNNLDPSGRAALGVHISAYENQNNNKGVEIEKIIPMDAAPLGVAIQG

SEQ ID NO: 10848 - protein, 165 aa, Aegilops speltoides
VMASSATTVAPFQGLKSTAGLPVSRRSSASLGSVSNGGRIRCMQVWPIEGIKKFETLSYLPPLSTEALLKQVDYLIRSKWVPCLEFSKVGFVFREHNSSPGYYDGRYWTMWKLPMFGCTDATQVLSEVEEVKKEYPDAYVRVIGFDNLRQVQCVSFIAFRPPGCE

SEQ ID NO: 10849 - protein, 435 aa, Arabidopsis thaliana
MEEERRVLFGKYEMGRLLGKGTFAKVYYGKEIIGGECVAIKVINKDQVMKRPGMMEQIKREISIMKLVRHPNIVELKEVMATKTKIFFVMEFVKGGELFCKISKGKLHEDAARRYFQQLISAVDYCHSRGVSHRDLKPENLLLDENGDLKISDFGLSALPEQILQDGLLHTQCGTPAYVAPEVLKKKGYDGAKADIWSCGVVLYVLLAGCLPFQDENLMNMYRKIFRADFEFPPWFSPEARRLISKLLVVDPDRRISIPAIMRTPWLRKNFTPPLAFKIDEPICSQSSKNNEEEEEDGDCENQTEPISPKFFNAFEFISSMSSGFDLSSLFESKRKVQSVFTSRSSATEVMEKIETVTKEMNMKVKRTKDFKVKMEGKTEGRKGRLSMTAEVFEVAPEISVVEFCKSAGDTLEYDRLYEEEVRPALNDIVWSRAR

SEQ ID NO: 10850 - protein, 350 aa, Escherichia coli O157:H7 EDL933
  unsure (1)..(350): unsure at all Xaa locations
MRFLLGVLMLMISGSALATIDVLQFKDEAQEQQFRQLTEELRCPKCQNNSIADSNSMIATDLRQKVYELMQEGKSKKEIVDYMVARYGNFVTYDPPLTPLTVLLWVLPVVAIGIGGWVIYARSRRRVRVVPEAFPEQSVPEGKRAGYVVYLPGIVVALIVAGVSYYQTGNYQQVKIWQQATAQAPALLDRALDPKADPLNEEXMSRLALGMRTQLQKNPGDIEGWIMLGRVGMALGNASIATDAYATAYRLDPKNSDATLGYAEALTRSSDPNDNRLGGELLRQLVRTDHSNIRVLSMYAFNAFEQQRFGEAVAAWEMMLKLLPANDTRRAVIERSIAQAMQHLSPQESK

SEQ ID NO: 10851 - protein, 154 aa, Aegilops speltoides
VMASSATTVAPFQGLKSTAGLPVGRRSSGSLGSVSNGGRIRCMQVWPIEGIKKFETLSYLPPLSTEALLKQVDYLIRSKWVPCLEFSKVGFVFREHNSSPGYYDGRYWTMWKLPMFGCTDATQVLSEVEEVKKEYPDAYVRVIGFDNLRQVQCV

SEQ ID NO: 10852 - protein, 487 aa, Salmonella enterica subsp. enterica serovar Dublin
MKKINHWINGQNVAGDDYFQTTNPATGDVLAEVASGGEAKLNQAVAAAKEAFPKWANLPMKKRARLMRRLGDLIDQNVPEIAAMETADTGLPIHQTKNVLIPRASHKFEFFAEVCQQMNGKTYPVDDKMLNYTLVQPVGVCALVSPWNVPFMTATWKVAPCLALGNTAVLKMSELSPLTADRLGELALEAGIPAGVLNVVQGYGATAGDALVRHHDVRGVSFTGGTATGRNIMKNAGLKKYSMELGGNSPVLIFEDAEIERALEAALFTIFLINGERCTAGLSIFIQQSIYPEFVKRFAERANRLRVGDPTDPNTQVGALISQQHWEKVSGYIRLGIEEGATLLAGGAEKPTDLPAHLKGGNFLRPTVLADVDNRMRVQEEIFGPVACLLPFKDEAEGLRLANDVEYGLASYIWTQDVSKVLRLARAIEAGMVFVNTQNVRDLRQPFGGVKASGTGREGGEYSFEVFAEMKNVCISMGDHPIPKWGV

SEQ ID NO: 10853 - protein, 184 aa, Triticum aestivum
PGIYLHSTTLAPPRDGLSATSVVPFPGLSPTAALPVSPAPNGASFGSVSNGGRIRCMQVWPIEGIKKFETLSYLPPLSTEALLKQVDYLIRSKWVPCLEFSKVGFIFREHNTSPGYYDGRYWTMWKLPMFGCTDATQVINEVEEVKKEYPDAYVRIIGFDNMRQVQCVSFIAFKPPACEESGKA

SEQ ID NO: 10854 - protein, 506 aa, Yersinia pseudotuberculosis
MRYAHPGTPEALVSFKAIYGNYIGGEFIEPLGGQYFMNTSPVNGSDIAQFPRSDARDIDAALDAAHQAADAWGKTSVQHRSNLLLQMADRIEANLEYLAVAESWDNGKPIRETLNADLPLAVDHFRYFAGCLRAQEGGVAEIDEKTVAYHFHEPLGVVGQIIPWNFPLLMAAWKLAPALAAGNCVVLKPAEQTPLGITLLLELVGDIFPAGVINVVQGYGREAGEALARSKRIAKIAFTGSTPVGRHIMACAAENIIPCTVELGGKSPNIYFADVMEAEPEFIDKAVEGLVLGFFNQGEVCTCPSRALIHESIYAPFMARVMTKVANIRRGDPLDTETMIGAQASRQQFDKILSYIDIARKEGGEILTGGARATITPALDSGFYIQPTLIKGDNLMRCFQEEIFGPVIGVTTFKDEAEALAIANQTQFGLGAGIWTRDAHLAYRMGRGIKAGRVWTNCYHVYPAHAAFGGYKQSGVGRETHKMALNQYQQTKNLLVSYDTAPLGLF

SEQ ID NO: 10855 - protein, 496 aa, Thlaspi arvense
MDLLYIVAALVIFASLLIAKSKRKPKKNLPPGPPRLPIIGNLHQLGEKPHRAMVELSKTYGPLMSLKLGSVTTVVATSVETVRDVLKTYDLECCSRPYMTYPARITYNLKDLVFSPYDKYWRQVRKLTVVELYTAKRVQSFRHIREEEVASFVRFNKQAASSEETVNLSQKILKMSGSVICRIGFGINLEGSKLENTYQEIIVQAFEVLGSLAAVDYFPVIGTIIDRITGLHAKCEKVFHGIDSFFDQAIQRHIDDPSIKDDIIDLLLKMERGEGSLGEYELTREHTKGILMNILTAGIDTSAQTMTWAMTHLLANPRVMKKLQAEIREKIKNIDEITDDDVEQLDYFKLVLKETFRISPIVPVLVPRVAAKDLKIAGYDVPEKTWIHVNMWAVHMSPSIWKDPETFNPERFIDNQTDFKGLNFELLPFGSGRRMCPGMGMGLAVVHLTLINLLYRFDWKLPNGMKAEELSIEENYGLICVKKLPLEAIPVLTQWT

SEQ ID NO: 10856 - protein, 322 aa, Candida tenuis
MSASIPDIKLSSGHLMPSIGFGCWKLANATAGEQVYQAIKAGYRLFDGAEDYGNEKEVGDGVKRAIDEGLVKREEIFLTSKLWNNYHDPKNVETALNKTLADLKVDYVDLFLIAFPIAFKFVPIEEKYPPGFYCGDGNNFVYEDVPILETWKALEKLVAAGKIKSIGVSNFPGALLLDLLRGATIKPAVLQVEHHPYLQQPKLIEFAQKAGVTITAYSSFGPQSFVEMNQGRALNTPTLFAHDTIKAIAAKYNKTPAEVLLRWAAQRGIAVIPKSNLPERLVQNRSFNTFDLTKEDFEEIAKLDIGLRFNDPWDWDNIPIFV

SEQ ID NO: 10857 - protein, 164 aa, Zea mays
FQAGTGIAELIALEISKQTNAPIEECRKKVWLVDSKGLIVDSRKGSLQPFKKPWAHEHEPLKTLYDAVQSIKPTVLIGTSGVGRTFTKEIIEAMSSFNERPIIFSQKKPTSHSECTAEQAYTWSQGRSIFASGSPFAPVEYEGKTFVPVHAYMIYICCNVVKAN

SEQ ID NO: 10858 - protein, 356 aa, Magnaporthe grisea
MSRANPPSNSSGSRKISFNVSEQYDIQDVVGEGAYGVVCSAIHKPSGQKVAIKKITPFDHSMFCLRTLREMKLLRYFNHENIISILDIQKPRSYETFNEVYLIQELMETDMHRVIRTQDLSDDHCQYFIYQTLRALKAMHSANVLHRDLKPSNLLLNANCDLKVCDFGLARSAASQENNSGFMTEYVATRWYRAPEIMLTFKEYTKAIDVWSVGCILAEMLSGKPLFPGKDYHHQLTLILDVLGTPTMEDYYGIKSRRAREYIRSLPFKKKVPFRTLFPKTSDLALDLLEKLLAFNPVKRITVEEALKHPYLEPYHDPDDEPTAPPIPEEFFDFDKHKDNLSKEQLKQFIYQEIMR

SEQ ID NO: 10859 - protein, 130 aa, Glycine max
  unsure (1)..(130): unsure at all Xaa locations
MAPAVMASSATTVXAPFQGLKSTAGLPVSRRSGSAGLSSVSNGGRIRCMQVWPIEGIKKFETLSYLPPLSTEALLKQVDYLIRSKWVPCLEFSKVGFVFREHNSSPGYYDGRYWTMWKLPMFGCTDATQV

SEQ ID NO: 10860 - protein, 480 aa, Listeria monocytogenes str. 4b F2365
MQIKNKAMLITYSDSLGKNMEELSKVMETYFEDAVGGIHLLPFFPSTGDRGFAPSDYTTVDSDLGSWEIIEKLGEKYYLMFDFMINHISRESLFFQDFKKEHLNSKYKDMFIRINDFFPPGRPNEKDLDLIYKRKDKAPFQEVEFADGGTELVWNTFGEEQIDLDVTAEVTKEFIRQTIKNMAAHGCSILRLDAFAYAIKKLDTNDFFVEPEIWDLLDEVKAEAAKYDMELLPEIHEHYSIQMKIANHDYYIYDFALPMVMLYSLYSGRVERLAKWLEMSPMKQFTTLDTHDGIGVVDARDLLTDEELDYTSAELYKIGANVKKIYSSEKYNNLDIYQINSTYYSALGDDDKSYLLARVIQCFAPGIPQIYYVGLLAGKNDIDLLEETKEGRNINRHYYTIDEIKNEVKRPVVKALCNLLRFRNTSEAFDLEGSIEIETPSSNEIVIIRKNKTNKITATLKANLSTKTFQISENERNILI

SEQ ID NO: 10861 - protein, 184 aa, Zea mays
  unsure (1)..(184): unsure at all Xaa locations
MASSMLSSATVVSSPAQAAMVAPFTGLKSSAAFPVTRKTDTDITSMASNGGRVNCMKVWPPVGKKKFETLSYLPDLTDVELSKEXVDYLXFRNKWIPCVXEFELEHGFVYREHGNPPGYYDGRYWNNVXNFPWFRCTDSAXQVLKEVXEGKKEYPKRFLXILGFQKKRQGPGFFFFPQKPPNFR

SEQ ID NO: 10862 - protein, 335 aa, Thermoplasma volcanium GSS1
MKAAILKKINEPVSIDDVDIPDPAENEVLIKQEYAGVCYRDLLAATGFFPRIALPMIQGHEIGGTVVKVGDKVEAFRPGDKVSSLIYIPCGKCEFCRSGNENLCPYKKSLGEEVQGGFRQYVNIPEISLVKAPNNVDGASLSLAACVTGMLYHALKRMGKAGEGKKVLITGAGGGVGIHAVEMAKAFGATVIAETTSPEKLDLLEKIGADYIVDGNSKFNEDVKKLGGADIVLECVGIYTFERSLRSLNNGGKMVIIGNVKPDPVSLPLGLIILKGNTIRGSISSTKKDVEEALNMVSKGMIKPIVGKEIDISQINEAYKLMKDKKSSGRIMIKF

SEQ ID NO: 10863 - protein, 308 aa, Mesorhizobium sp. BNC1
MKTYKLVNRDVSAPGRDSAADADGSGVEMPMIGLGVFQTPPDETTAAVEEALRLGYRHIDTAAAYGNEREVGEGIRRAGIARDEVFIETKIWISDYGYDETLHAFDKSAGKLGVDQIDLLLLHQPLPSAFDRTLGAYRALEKLLADGKVRAIGVSNFMPEHLTRLLTETSIVPAVNQIEVHPYFQQRALQRLHAEHGILTQAWSPIGGITFYRGGEKSTLEDPVLLEIAQQHGKSAAQVMLRWHLQEGRSVIPKSTKPARIAENFDVFDFELSGEQIAAIDALDTGVRSGPEPDSITLESYGRPIPEA

SEQ ID NO: 10864 - protein, 283 aa, Listeria innocua Clip11262
MKTVKLNNGIEVPILGFGTYQITDAGEAEQAVKEAIAAGYRHIDTAQSYMNEEAVGRGIAASGVDRKELFITTKIWVENVSYKGVMSSFDRSLKRLGLDYIDLLLIHQPYNDVYGAWMAMEELQAQGKIKAIGVSNFGVDRVVDLAAFNDITPQVNQIEINPFQQQSKNIEALRKEGVAVEAWAPFAEGKNDIFTNPILTKIAEKYGKSVAQVILRWLIEQDIIVLAKSVKPERMAQNLAVFDFELSEEDKSAIATLNQGESQFFSHADPEMVKWMASRKINI

SEQ ID NO: 10865 - protein, 259 aa, Triticum aestivum
  unsure (1)..(259): unsure at all Xaa locations
MKTLLILTILAMAITISTANMQVDPSGQVQWPQQQLVPQPQQPLSQQPQQAFPQPQQTFPHQPQQQVPQPQQPQQPFLQPQQAFPQQPQQPFPQTQQPQQPFPQQPHQPFPQTQQPQQPFPXQPQQPFPQTQQPQQLFPQSQQPQQQFSQPQQQFPQPQQPQQSFPQQQPPFIQPSLQQQVNPCKNFLLQQCKPVSLXVSSLWXSMIWPQSDFQXWMRQQCCQQLAQFLKQSQCASIHTIIHSIIKAPFSSVVAGIGGQ

SEQ ID NO: 10866 - protein, 67 aa, Glycine max
MASSVISAPAGTTVNRAGAGMVAPFTGLKSMAGCPSRRTKNDVSSIASSGGRVQCMQVWPPVGREEV

SEQ ID NO: 10867 - protein, 279 aa, Enterococcus faecalis V583
MITSLADTVTLNNGTKIPGMGLGVFQIPDEETAKVVEEGIINGYRLIDTAQIYGNESGTGAGIKAGLAATGLNREDLFVTSKVWNAHISYDETIQAFNDSLERLGLDYLDLYLIHWPGNNSYKESWQALETLYAEGKVKAIGVSNFQVHHLEDLLSYAKVVPVINQVELHPKLDQKEVRDFCEKHDIKVQAWSPLMQGQLLSNETILAIAENHNKSAAQVILRWDIQQDILLAVKSVHKERMISNAAVFDFELSAEEMAQINQLNESLRVGPDPDTFDF

SEQ ID NO: 10868 - protein, 287 aa, Hordeum vulgare subsp. spontaneum
MSPTLSLKLKKSSHTPQSSVSSSTKLRLFKKEAACQSPSTLPVAMDMGLEVSSPSPFSSSVSSSPEHTAKRPAGRTKFRETRHPVYRGVRRRGNTERWVCEVRVPGKRGARLWLGTYATAEVAARANDAAMLALGGRSAACLNFADSAWLLAVPSALSDLADVRRAAVEAVADFQRREAADGSLAIAVPKEASSGAPSLSPSSGSDSAGSTGTSEPSANGVFEGPVVMDSEMFRLDLFPEMDLGSYYMSLAEALLMDPPPTATIIHAYEDNGDGGADVRLWSYSVDM

SEQ ID NO: 10869 - protein, 287 aa, Hordeum vulgare subsp. spontaneum
MSPTLSLKLKKSSHTPQSSVSSSTKLRLFKKEAACQSPSTLPVAMDMGLEVSSPSPFSSSVSSSPEHTAKRPAGRTKFRETRHPVYRGVRRRGNTERWVCEVRVPGKRGARLWLGTYATAEVAARANDAAMLALGGRSAACLNFADSAWLLAVPSALSDLADVRRAAVEAVADFQRREAADGSLSIAVPKEASSGAPSLSPSSGSDSAGSTGTSEPSANGVFEGPVVMDSEMFRLDLFPEMDLGSYYMSLAEALLMDPPPTATIIHAYEDNGDGGADVRLWSYSVDM

SEQ ID NO: 10870 - protein, 431 aa, Deinococcus radiodurans R1
MGERKCGGWPPKVFLHSLSPGGAGGSTKAVVWHGIGDIRLDDVPEPKIEAPTDAIVRLTASAICGTDLHFIRGTMSDMVPGTILGHEGVGIVEAVGPEVRNFVPGDRVVIPSSASCGYCPPCREGNTSQCDNANPNGPSAGTAFYGGPKSSGPLNGMQAEKVRVVYANSSLVKLPDNVSDDQAIMISDIFPTAYFGAEIAGVKTGSVVVVLGCGPVGQFSIISAKLLGATRVIAVDRLDDRLDMARKNGAEVINFEKEDPVEAVKKLTGGLLADCVIDAVGVDAQHAHAGPAKPDAEKEQKFEQEVQEVAPDAKPEKDGQWTPGDAPSQASEWAIEMTKKAGQIGIIGVYSPQMTTYPIGKAMNKNLTIRMGNCNHRAIIPGLVDLVAAGVVDPARVLTEHEHLGSAIEAFEAFDKRQPGWIKVELEPQAG

SEQ ID NO: 10871 - protein, 169 aa, Sinorhizobium meliloti 1021
MQRSLRHLLVHGRRQLMTFSLISPVFADGQPIPQKYTRFGENLFPPLKWTGTPEATQSFALIVEDPDAVSGLFRHCSIINIPGSWTELPQAVDTGPERGIKFIRNDFGNARYDGPQPPSGTGVHRYRFRLAALDAANLSIPDDVGAAEAWERACKHLIGEAEIVGTYEG

SEQ ID NO: 10872 - protein, 287 aa, Hordeum vulgare subsp. spontaneum
MSPTLSLKLKKSSHTPQSSVSSSTKLRLFKKEAACQSPSTLPVAMDMGLEVSSPSPFSSSVSSSPEHTAKRPAGRTKFRETRHPVYRGVRRRGNTERWVCEVRVPGKRGARLWLGTYATAEVAARANDAAMLALGGRSAACLNFADSAWLLAVPSALSDLADVRRAAVEAVADFQRREAADGSLAIAVPKEASSGAPSLSPSSGSDSAGSTGTSEPSANGVFEGTVVMDSEMFRLDLFPEMDLGSYYMSLAEALLMDPPPTATIIHAYEDNGDGGADVRLWSYSVDM

SEQ ID NO: 10873 - protein, 171 aa, Oryza sativa (japonica cultivar-group)
MAAAPSATSVHDFTVKGVQDASGKDVNLSTYKGKVLLIVNVASQCGLTNSNYTELSQLYEKYKVQGFEILAFPCNQFGGQEPGSNEEIVQFACTRFKAEYPIFDKVDVNGNNAAPLYKYLKSNKGGLFGDSIKWNFSKFLVDKEGRVVDRYAPTTSPLSIEKDIKKLLGSS

SEQ ID NO: 10874 - protein, 364 aa, Haloarcula marismortui ATCC 43049
MQGADADTVADALASDDALPGAGGFAGELDGTLVRDVLGRYPLFVERAVSDEARLDPGQWSHDPTALADPRSFPAGHIRNESGTQQRWSLPSLDPFGDRETAIETVGETVETSIDAVDTDSLAIAFSGGVDSALLAARLDAPLYVAGFPDSHDIEAARSAAELLGTEVRVVELTHDAIERAVPEIARATARTNAMDVQIALPLYLVAERVAGDGFDRLALGQGADELFGGYAKVAKAPEDPRVEADTVRGAQREVIASLPDQLERDVLALRAAGVEPVTPLLHDRVIGAALRLDGDLLVDGETRKVALRAAARESLPDEIADRDKKAAQYGSLAARELDRLARQAGYKRRMDDHVTQYVESLVE

SEQ ID NO: 10875 - protein, 243 aa, Methanococcoides burtonii DSM 6242
MYANIRPIKPLPGLIGVTGKNDFDLVIVRENTEGMYSSIEEIHDDVAYTKRVVSRKGSERIARSACKLAKERKNQVTIVHKSNVLKSDTLFLGVCREVAASEGVEYSDMLVDAMAYSLMSYPERYDVVVTTNLFGDILSDMSAALVGSLGLVPSANIGDKYAFFEPVHGSAPDIAGKGIADPIAAILSMKMMLEWMGYEREAVLVENAVSSSIKENMTTPDLGGSSNTSDVGKVIADHVRNNL

SEQ ID NO: 10876 - protein, 375 aa, Nicotiana tabacum
MEVISTNTNGSTIFKNGAIPMNGHQNGTSEHLNGYQNGTSKHQNGHQNGTFEHRNGHQNGTSEQQNGTISHDNGNELLGSSDSIKPGWFSEFSALWPGEAFSLKVEKLLFQGKSDYQDVMLFESATYGKVLTLDGAIQHTENGGFPYTEMIVHLPLGSIPNPKKVLIIGGGIGFTLFEMLRYPSIEKIDIVEIDDVVVDVSRKFFPYLAANFNDPRVTLVLGDGAAFVKAAQAGYYDAIIVDSSDPIGPAKDLFERPFFEAVAKALRPGGVVCTQAESIWLHMHIIKQIIANCRQVFKGSVNYAWTTAPTYPTGVIGYMLCSTEGPEVDFKNPVNPIDKETTQVKSKLGPLKFYNSDIHKAAFILPSFARSMIES

SEQ ID NO: 10877 - protein, 466 aa, Escherichia coli O6
MDKKQVTDLRSELLDSRFGAKSISTIAESKRFPLHEMRDDVAFQIINDELYLDGNARQNLATFCQTWDDDNVHKLMDLSINKNWIDKEEYPQSAAIDLRCVNMVADLWHAPAPKNGQAVGTNTIGSSEACMLGGMAMKWRWRKRMEAAGKPTNKPNLVCGPVQICWHKFARYWDVELREIPMRPGQLFMDPKRMIEACDENTIGVVPTFGVTYTGNYEFPQPLHDALDKFQADTGIDIDMHIDAASGGFLAPFVAPDIVWDFRLPRVKSISASGHKFGLAPLGCGWVIWRDEEALPQELVFNVDYLGGQIGTFAINFSRPAGQVIAQYYEFLRLGREGYTKVQNASYQVAAYLADEIAKLGPYEFICTGRPDEGIPAVCFKLKDGEDPGYTLYDLSERLRLRGWQVPAFTLGGEATDIVVMRIMCRRGFEMDFAELLLEDYKASLKYLSDHPKLQGIAQQNSFKHT

SEQ ID NO: 10878 - protein, 78 aa, Brassica napus
MGFWTLMEGLLLFANALAILNEDRFLAPRGWTLTELHQTGKRNSLKGQIVGLIHACHYMRLPLMLFNLIVIVFKLFSG

SEQ ID NO: 10879 - protein, 394 aa, Vibrio vulnificus CMCP6
MLSENTINIVKSTAPLLAETGPKLTAHFYQRMFEHNPELKDIFNMSNQRNGDQREALFNAICAYASNIDNLPALLGAVEKIAHKHSSFLITADQYQIVGGHLLATIDELFSPGQAVLDAWAEAYGVLANVFIQREEQIYQDNQSQTGGWRGLREFELVEKQYESAHICSFVFKPVDGGSVVSFKPGQYLGIYINDEQFENQEIRQYSLSSSVRPDCYRISVKREEGGRVSNYLHDHLDVGSKVKLAAPAGDFFLDAAPTAPVVLISAGVGLTPTLSMLESLTEHQAPVTWIHATENGQQHAFKQHVKQLVETHPHFNSLVWYNQPNSDDKIGDDFQFSGWVNLHEIETVLKQADVQVYFCGPVGFMQFIAKQLLEMGVPEQQFHYECFGPHKVV

SEQ ID NO: 10880 - protein, 400 aa, Bordetella bronchiseptica RB50
MSTSQKKPTVQQKKPAAQPAEKAAFKPKKSVALSGVVAGNTALCTVGRTGNDLHYRGYDILDFAGSAEFEEIAHLLVHGKLPNKAELKAYKEKLRALRGLPAQLQNVLECLPASSHPMDVMRTAVSVLGCVLPEKDDHNTPGARDIADRLMANLGSALLYWYHYSHNGRVIDVQTDDDSIGGHFLHLLHGAKPSDEWVRAMHTSLILYAEHEFNASTFTGRVIAGTGSDMYSSITGAIGALRGPKHGGANEVAFEVQKRYETPDEAEADIRQRVENKEVIIGFGHPVYTVSDPRNKVIKDVAKKLSRKAGSTKMFDIAERLETVMWDIKKMFPNLDWFSAVSYHMMGVPTAMFTPLFVIARTAGWSAHIIEQRIDNKIIRPTANYVGPEDQTYVPISKRA

SEQ ID NO: 10881 - protein, 317 aa, Escherichia coli O6
MTDKLTSLRQYTTVVADTGDIAAMKLYQPQDATTNPSLILNAAQIPEYRKLIDDAVAWAKQQSNDRAQQIVDATDKLAVNIGLEILKLVPGRISTEVDARLSYDTEASIAKAKRLIKLYNDAGISNDRILIKLASTWQGIRAAEQLEKEGINCNLTLLFSFAQARACAEAGVFLISPFVGRILDWYKANTDKKEYAPAEDPGVVSVSEIYQYYKEHGYETVVMGASFRNIGEILELAGCDRLTIAPALLKELAESEGAIERKLSYTGEVKARPARITESEFLWQHNQDPMAVDKLAEGIRKFAVDQEKLEKMIGDLL

SEQ ID NO: 10882 - protein, 154 aa, Glycine max
VSYGVEFEGAGASKESKVNGDGGRDVNLGDSNYSFGEAEALSDEMEEESRYVAEILRIRDVLLNPEDESEAVLFDSLRRLQMMELTEDCLKATEIGKAVNPLRKHGSKDIRQLSRTLIDGWKEMVDEWVKATTTTAITGSEEGTPDSANPSVVD

SEQ ID NO: 10883 - protein, 448 aa, Deinococcus radiodurans R1
MSLDLLLRGAVLVTPEGERRADLGIVGGQIAELTDEIATPAAQTLDVSGLHVFPGVLDDHVHLNEPGRTHWEGFETGTQALAAGGATSFLDMPLNSSPPVLTRERFEDKARLGEEKSLIDFGLWGGLTPLNLDQLDDLAECGVIGLKAFMSHSGLDEFPAADDLTLYEGMRTAKRHGLVVATHAESNEFTRRLTETARAQGKSGVRDYLESRPVVTELEAVQRALLFAQDTGAALHLVHVSSGAAVALAYEGKQKGIDVTIETCPHYLHFTGEDVERVGAALKCAPPLRDPAVQEELWRELLAGHIDTVGSDHSPAPPDMKTSEDFFSLWGGISGAQSTLNVMLEDGYAQRGLPLEIIAALLALNPAQRFGLPQKGRLAVGADADFALVALGEKFTLDTLYDRWQQNPYRGQSFQGRVHATYLRGQPVYQNGEFTGTPRGRLLRPRSL

SEQ ID NO: 10884 - protein, 433 aa, Leptospira interrogans serovar lai str. 56601
MIWYPFTLQFEPDSPLKIERAKGEFLYDELGNSYIDGISSWWVSIHGHNHPKIVQAVKNQLEKLDHVLLAGFTHDPAEKLAAELLKITDGLFQKVLYSDNGSTAVEIMIKLAYQYFQNIGEVDRKIFIKWNSSYHGDTIGTMSVGGNSVFNRVFQGLMFPTKEFQTPNCNFCPMGKKPESCKVECIDPIEKFFQKSPKAVAGIVIEPLILGSGGMIFYKEEVLQRLETISKKYGSLLLLDEVFTGFGRTGSVFAYQRAKIRPDFIALAKGLSAGVSAVAVTLTTDRIHSAFVTADPEKGFYHGHTMTGNPIACSAALASLKIFFEENRLEQILRLESKLNVGLKKIAKEFPKAVKNCRVLGAVGVLELEVGKASGYHYPGNKILKKKFLEKGVLLRPLGNVIYLTPPYNIENSSLEKIFSAIRETLSEISFGN

SEQ ID NO: 10885 - protein, 191 aa, Ustilago maydis 521
MQTIKCVVVGDGAVGKTCLLISYTTNKFPSEYVPTVFDNYAVTVMIGEDPYTLGLFDTAGQEDYDRLRPLSYPQTDVFLVCFSVTSPASFENVKEKWFPEVHHHCPGVPCLIVGTQVDLRDDHAVIEKLARSKQRPVPFEAGERLARELGAVKYVECSALTQKGLKNVFDEAIVAALEPPVIRKKSKCAIL

SEQ ID NO: 10886 - protein, 426 aa, Enterococcus faecium
MKTLIKNGQINTRKNMTTPAEIWIEDGRIKAIGTGFSEAEFDEVFDAKGQLITPGLVDVHVHLREPGFTYKETIEAGTRSAARGGFTTVCAMPNLNPVPDTAEKLRQVYDIIRKDAVVKVLQYAPITENLRSEKLVDQEALIEEGAFAFTNDGVGVQTAGTMYLAMKEAAKNNKALVAHTEDESLLFGGVMHAGKKAEELGLPGILSVTESSQIARDLLLAEATGVHYHVCHVSTKESVRVIRDAKKAGIHVTAEVSPHHLILIDEDIPEDFGFWKMNPPLRGREDREALIEGLLDGTIDCIATDHAPHGLEEKSQSFMKSPFGIVGSETAFQLIYTHFVETGRFTLEQVINWLAVKPAEIFGLNAGTLTVGAPADVAVFDITQTCTIDKEDFLSKGENTPFIGWKVKGETQMTFVNGKLVWQKGE

SEQ ID NO: 10887 - protein, 240 aa, Triticum aestivum
GTRVLQDTLGVCGQIIPWNFPFMMLAWKVAPALACGNTVILKPAEQTPLSALYFGNLVKEAGLPAGVVNVLPGLGPSTGKAIAGHMDIDKVAFTGSTNTGRAIMKDAANNLKNITLECGGKSPSIVFADAELEQAVKWCHFGIMDNKGEVCTSTSRIYVHEDIYDKFLEKFVEVTKENDKLGAPFDESTVQGPQVSKTQYDRVLSYIEEGRKSGAKLLYGGSKHGDKGYFLQPTVFADTT

SEQ ID NO: 10888 - protein, 206 aa, Kluyveromyces lactis
MNSEYDYLFKLLLIGNSGVGKSCLLLRFSDDTYTNDYISTIGVDFKIKTVELDGKTVKLQIWDTAGQERFRTITSSYYRGSHGIIIVYDVTDRESFNGVKMWLQEIDRIATSTVLKLLVGNKCDLKDKRVVEYDVAKEFADANKMPFLETSALDSTNVEDAFLTMARQIKESMSQQNLNETTQKKEDKGNVNLKGQSLTNTGGGCC

SEQ ID NO: 10889 - protein, 463 aa, Crocosphaera watsonii WH 8501
MANLNPTASYSLALTIELPNIAGTLANVTQAIAGAQGSFGQISLIEHNLKITQREITVEASSEEHAEQIVSAVREIPNVKILKVSDRTFELHRKGKITIESRLPLHSQGDLAMAYTPGVGRICKAIATDPSEVYNLTIKNNTVAVVTDGSAVLGLGNLGPEAALPVMEGKAMLFKEFAKVDAFPICLATQDTEEIIETVKRIAPVFGGINLEDIAAPRCFEIEKRLRQELDIPVFHDDQHGTAIVTLAALFNALKLVHKTLEGVRIVINGAGAAGVAIASLLRAAGATTIWLCDSKGLISHNREDLNPQKKAYAVSASGTLADAMQGADVFLGVSAPGVVTPEMVRSMNKDPIVFAMANPIPEIQPELVTNDVAVMATGRSDYPNQINNVLAFPGVFRGALDCRAKNITERMYLEAAKAIASLVHSNQLNAEHIVPSVFDERVSHAVASAVELAARQDGVANQ

SEQ ID NO: 10890 - protein, 158 aa, Glycine max
  unsure (1)..(158): unsure at all Xaa locations
MDSSLISFPAVTTVNRAGAGMVAPFTGLKYMAGFPTIKTNNDITSIASNGGRVQCMHVWPPLGKKKLETLYYLADLDDAQLLEEVEYLLRKGWIPCLXIXLEHGFLYREHNRLPXYYDGRYCTMCKLPMXCCTDASQVSEELQEATTAYSSCFMRIIA

SEQ ID NO: 10891 - protein, 362 aa, Sorghum bicolor
MGSTAEDVAAVADEEACMYAMQLASSSILPMTLKNALELGLLEVLQKDAGKALAAEEVVARLPVAPTNPAAADMVDRMLRLLASYDVVRCQMEDKDGKYERRYSAAPVGKWLTPNEDGVSMAALALMNQDKVLMESWYYLKDAVLDGGIPFNKAYGMTAFEYHGTDPRFNRVFNEGMKNHSVIITKKLLEFYTGFDESVSTLVDVGGGIGATLHAITSHHSHIRGINFDLPHVISEAPPFPGVQHVGGDMFKSVPAGDAILMKWILHDWSDAHCATLLKNCYDALPEKGGKVIVVECVLPVTTDAVPKAQGVFHVDMIMLAHNPGGRERYEREFRDLAKAAGFSGFKATYIYANAWAIEFIK

SEQ ID NO: 10892 - protein, 509 aa, Candida boidinii
MTTVRTDAIVIGAGIAGVKASIELTKAGVSNIILEARDRTGGRLNTVKTPNGRSFDLGASWFHDCLDNPLFEKTIAKGDIKFYFDDASLNLYNKDGYIHDDERLVPIFEEMQTYLETYWTPKSRENDVSIREAAYQYLLKKKNVLTDFQLKNAPQLLRSFELWIGSSWDILSARHICGDKHLGRNAFCLDGWSSVYNNELAELSQISGCGDDTKRLETSNKLYLNTEVKKITFSDWRKEITIKTKNTKTNKIDTYICKYIICTAPLSILKLQKNEVGSIEWSPKLPKQISSALDNLSFSALGKILFEFDEVFWPKDSDRFFCLPDYDAEMYNKVKRGDTNSGIEIRTSEKDIKSAPDAEGFTHPVLFLNVYRMNGAPALACLISNPLTKWIEADPQNRAWPVIKPLLAKIVSSLPNAPKEIPAPKSITCTNWTTDPYARGSYTGLTVHDEFEDGIQTLIDAKGIFDGKGRVRFAGEHCILQGSGCAHGAWRSGAREAAEIVKRINNSKL

SEQ ID NO: 10893 - protein, 293 aa, Hordeum vulgare subsp. spontaneum
MSPTLSLKLKKSSHTPQSSVSSSTKLRLFKKEAACQSPSTLPVAMGMGLEVSSSSPSSSSVSSSPEHAARRASPAKRPAGRTKFRETRHPVYRGVRRRGNTERWVCEVRVPGKRGARLWLGTYATAEVAARANDAAMLALGGRSAACLNFADSAWLLAVPSALSDLADVRRAAVEAVADFQRREAADGSLAIAVPKEASSGAPSLSPSSGSDSAGSTGTSEPSANGEFEGPVVMDSEMFRLDLFPEMDLGSYYMSLAEALLMDPPPTATIIHAYEDNGDGGADVRLWSYSVDM

SEQ ID NO: 10894 - protein, 476 aa, Pirellula sp. 1
MNQHSPSYAITIRLRYSDSPGAMGKITTAIGEADGAIGAVDIVNIRGGKISRDFTVNARDVDHGKRIVEHLRTVEEVEVVHTSDRVFLMHLGGKIEVLPKMPIKTRDDLSMAYTPGVARVCNAIAEDPDSSFALTIRQNTVAVVSDGSAVLGLGNIGPRAAMPVMEGKAMLFKEFAGVDAFPICLDTQDTEAIIETVRQLAPTFGGVNLEDISAPRCIEIEERLDKELEIPVFHDDQHGTAIVVLAGLKNSLLRVGKALPNIRIVVNGAGAAGTAIVKLLLISGAKDIVVCDRDGAIHAGEPSQPDASKQWIADNTNPRGASGKLSEVIQGADVFIGVSAPNVLQTEDVAAMAADPIVFALANPDPEILPANAAPHVRIMATGRSDFPNQINNVLCFPGLFRGVLDVRATTINNEMKLAAAEAIAATIPESDLLDDYVIPSVFDRRVAKVVAQAVAKAAVDTGVARRRNKPAEDIM

SEQ ID NO: 10895 - protein, 293 aa, Hordeum vulgare subsp. spontaneum
MSPTLSLKLKKSSHTPQSSVSSSTKLRLFKKEAACQSPSTLPVAMDMGLEVSSSSPSSSSVSSSPEHAARRASPAKRPAGRTKFRETRHPVYRGVRRRGNTERWVCEVRVPGKRGARLWLGTYATAEVAARANDAAMLALGGRSAACLNFADSAWLLAVPSALSDLADVRRAAVEAVADFQRREAADGSLAIAVAKEASSGAPSLSPSSGSDSAGSTGTSEPSANGVFEGPVVMDSEMFRLDLFPEMDLGSYYMSLAEALLMDPPPTATIIHAYEDNGDGGADVRLWSYSVDM

SEQ ID NO: 10896 - protein, 129 aa, Buchnera aphidicola str. Sg (Schizaphis graminum)
MSLGMITMSITKEQILEAVSEMSVMNVVELISAMEKKFGVSANMSVNTNNNSEKSTIEEKTEFDIFLKSIGPNKVSVIKSVRSATGLGLKEAKDLVESAPTVLKENMSKNDAESLKKTLEDAGAEIEIK

SEQ ID NO: 10897 - protein, 411 aa, Rickettsia montanensis
DSEFAELKIRGKIFELPILKASIGEDVIDISRVSAEADCFTYDPGFMSTASCQSTITYIDGDKGILRHRGYDIKDLAEKSDFLEVAYLLIYGELPSGEQYNNFTKQVAHHSLVNERLHYLFQTFCSSSHPMAIMLAAVGSLSAFYPDLLNFKEADYELTAIRMIAKIPTIAAMSYKYSIGQPFIYPDNSLDFTENFLHMMFATPCTKYKVNPIIKNALNKIFILHADHEQNASTSTVRIASSSGANPFACISTGIASLWGPAHGGANEAVINMLKEIGSSEYIPKYIAKAKDKNDPFRLMGFGHRVYKNYDPRAAVLKETCKEVLKELGQLDNNPLLQIAIELEAIALKDEYFIERKLYPNVDFYSGIIYKAMGIPSQMFTVLFAIARTVGWMAQWKEMHEDPEQKISRPR

SEQ ID NO: 10898 - protein, 355 aa, Botryotinia fuckeliana
MTARAPNPASGSRKISFNVSEQYDIQDVVGEGAYGVVCSALHKPSGQKVAIKKITPFDHSMFCLRTLREMKLLRYFNHENIISILDIQKPRNYESFTEVYLIQELMETDMHRVIRTQDLSDDHCQYFIYQTLRALKAMHSANVLHRDLKPSNLLLNANCDLKVCDFGLARSAASQEDNSGFMTEYVATRWYRAPEIMLTFKEYTKAIDVWSVGCILAEMLSGKPLFPGKDYHHQLTLILDVLGTPTMEDYYGIKSRRAREYIRSLPFKKKVPFKTMFPKTSDLALDLLEKLLAFNPVKRITVEEALKHPYLEPYHDPEDEPTANPIPEEFFDFDKNKDNLTKEQLKKLIYDEIMR

SEQ ID NO: 10899 - protein, 89 aa, Glycine max
SRQADNDCIEDEGFRGNGLPRWASHALELVELILRPPEGGPPCLPDHSEQVISALNLLRFILIIDSRGQRSAKLFRKETLHKVHSEWLT

SEQ ID NO: 10900 - protein, 98 aa, Glycine max
  unsure (1)..(98): unsure at all Xaa locations
QLPNHTVHTGSDCGAIAHLHXEHGQNFLDMLDGISLFVLLXDTRDPSSIVALDAIYGTFLYIDWGIDGSYWISSEXKGLNDRLXHIAPFTPCHSYSSI

SEQ ID NO: 10901 - protein, 192 aa, Triticum aestivum
  unsure (1)..(192): unsure at all Xaa locations
RRPTPSVPGSRSNNTLPWSPAVMASSATTGAPFQGXKSTAGLPVGRRSSGSLGSASHGGWIMCMQVWPIXGIKKFETLSYLPPLSTEALLKQVDYLIRSKWVPCLKFNKVAFLFREHNSFPGYYDGRYWTMWKLPMFWCTDTTQVLNXEVEDVKKEYPDSYIRVIRLDNLRQLQCVIFIAFRPSGCEEYDKA

SEQ ID NO: 10902 - protein, 380 aa, Mycobacterium bovis AF2122/97
MSKKHTTLNASIIDTRRPTVAGADRHPGWHALRKIAARITTPLLPDDYLHLANPLWSARELRGRILGVRRETEDSATLFIKPGWGFSFDYQPGQYIGIGLLVDGCWRWRSYSLTSSPAASGSARMVTVTVKAMPEGFLSTHLVAGVKPGTIVRLAAPQGNFVLPDPAPPLILFLTAGSGITPVMSMLRTLVRRNQITDVVHLHSAPTAADVMFGAELAALAADHPGYRLSVRETRAQGRLDLTRIGQQVPDWRERQTWACGPEGVLNQADKVWSSAGASDRLHLERFAVSKTAPAGAGGTVTFARSGKSVAADAATSLMDAGEGAGVQLPFGCRMGICQSCVVDLVEGHVRDLRTGQRHEPGTRVQTCVSAASGDCVLDI

SEQ ID NO: 10903 - protein, 260 aa, Listeria monocytogenes str. 4b H7858
MPRLGFGVWKVQDGDEAVNSVKWAIEAGYISIDTAAAYKNEEGVGQAIKESGVKREDLFVTTKLWNAEQGYESTLAAFDESLRKLELDYVDLYLIHWPVKGKFKDTWRAFEKLYKDKRVRAIGVCNFHEHHLKELMEDAEIAPMVNQIELHPQLTQEPLRKFCAENNIVVEAWSPLGNGKLLSNPEIKAIADAHGKSVAQVILRWDLQIGVVTIPKSVHQERIIQNADIFDFELSEEEVAKISGLNKDERTGPDPDNFNF

SEQ ID NO: 10904 - protein, 414 aa, Triticum aestivum
  unsure (1)..(414): unsure at all Xaa locations
NPTPTTAKKIHRSIDLGARRTATRSDHIQRRKIKPPPPPXMKLQTEAAAAGGEGRLMIRQVWANNVESEFQAIRQVAERFPYVSMDTEFPGVIHCPSKHHATLTPSERYAALKANVDALHLIQVGLAFAASPXAAPAVAFEINLREFDPRVPDPVGAVRGAQGERGRAPPDPGGPGVRARAXPPPAGPLGLVRPGSDRRAPTWVTFHSAYDFGYLVKLLMGRKLPRTLPEFLGLVXRVFFGDQVYDARPAWVTCPSPYGCLGRPGRRSWAXLPPPRSPSLRLVRARSPGTSSAGIRDVYCAGGTSGGLDALAAQLGVKRPAGMSHQAGSDAALTWDVFRRIREVYFAGNSRQGQGQGVGNFAGVLYGLDLELHLAAPADNGNGNGNRNNNKNKCGSGNGAGGRGNNRRAVAALR

SEQ ID NO: 10905 - protein, 244 aa, Brucella melitensis 16M
MRIRGGRNGNSGMDEARKLKIAAAAEALTYVKDGMRLGIGTGSTAEEFVRLLAEKVKGGFRVIGVPTSERTAKLCEELGVALTTLEETPHLDLTIDGADEVDGELSLIKGGGGALLREKIVAAASDSMIVIADQSKVVETLGRFPLPIEVNRFGLGATIRAIEAAAVKCGLAGPLNLRLKDGSPFLTDGGHYIVDASFGRIPDPKTLSDALFAIPGVVEHGLFIELARAAIIAGTDGIRTMNRS

SEQ ID NO: 10906 - protein, 370 aa, Brucella suis 1330
MASRKLLLLPGDGIGPEAMAEVRKVIAFLNSDLNLGFETEEGLVGGCAYDAHGQAISDADMEKALAADAVLFGAVGGPKWDSVPYEVRPEAGLLRLRKDMQLYANLRPAICYPALAHSSSLKPEVIEGLDILILRELTGGVYFGEPKEIIDLGNGQKRGIDTQVYDTYEIERIADVAFELARTRRNKVTSMEKRNVMKSGVLWNQVVTARHKEKHADVQLEHMLADAGGMQLVRWPKQFDVILTDNLFGDLLSDVAAMLTGSLGMLPSASLGAADSKTGKRKALYEPVHGSAPDIAGKGIANPIAMIASLAMCLRYSFGLVAEADRLEAAIAGVLDDGIRTADIWSEGNTKVGTTEMGDAILAKFKALSA

SEQ ID NO: 10907 - protein, 447 aa, Triticum aestivum
  unsure (1)..(447): unsure at all Xaa locations
MENSGKIVMGRXELGGEIGKGAFGKVHYAKNLESNRGVAIKILDKEKVLKVGLAEQVRREITTMRLVAHKSIVQLHEVMATRSKIYFVMEYMKGGELFDKVSKASKLTEGAAHKNFQQHTSGVALGYRRRVXHRVLKALNLLLLGMAWRKGSAFGLSALSESKSHEGMLHTTCGSPAYVAPEVISKGGYDGAKSDIWSCGVILFVLVAGYLPFQGQNLIEMYRKIEKGDFRCPGWVSQKLQKLLYKIMDPDPNKRISIQKIKESTWFRKGPGENLTVKERLPSENATTDAVPTLGVRRRKNSHEDAKPLAVTNLNAFEIISFSTGFDLSGLFVEKESKKEARFTSEQPASAIVSKLEAVAKTLNLRVRKKDNGVVKMQVRKEGRNGVLQFDSEIFEISPSYHLIEMKQTSGDSLEYQKLLEEGIRPALKDICLXAWHGADGQQEHQG

SEQ ID NO: 10908 - protein, 255 aa, Candida boidinii
MSEINETIGENPQPVEHHEPAPLQHEEQQQQQNHDQDQDQRQQQQNLAQQQQELEEKQKELQIQLEQQQQAGISEDDQELAILKAKMEEMKQEANALREMQEQMGNNGTHPHLDLAARQDIDNRSVYIGNLDYAATPDELQKHFESCGSINRITIPTNKFTGNPKGFAYIEFSDASYVPQALSLNDSLFKGRNLKISAKRTNVPGFSRGRGGPMRGGFRGGRGGFRGRGGFRGGRGGGFRGRGGFRGGRGGFQPY

SEQ ID NO: 10909 - protein, 272 aa, Oryza sativa (indica cultivar-group)
MGRRACCAKEGMKRGAWTSKEDDVLASYIKSHGEGKWREVPQRAGLRRCGKSCRLRWLNYLRPNIKRGNIDDDEEELIVRLHTLLGNRWSLIAGRLPGRTDNEIKNYWNSTLSRKIGTAATAAAGSRGGSTPDTARATDAASSSSVVPPGQQQQPASRADTDTATAAAAAAATTTTVWAPKAVRCTRGFFFHDRETAPLAAAAPAPAGELGDGDDVDCDYYCSGSSSAATTTSSSSLPAVVEPCFSAGDDWMDDVRALASFLDTDDAWNLCA

SEQ ID NO: 10910 - protein, 441 aa, Ralstonia metallidurans CH34
MTHVFHRNPKQTLPVAVGGQGIELIDSNGRRYLDASGGAAVSCLGHGHPRVIEAIKAQVDTIAYAHTSFFTTEVSETLAQTLADAAPGDLDHVYFVSGGSEAVEAALKLARQYFVEIGQTQRRHFIARRQSYHGNTLGALAIGGNAWRREPFLPLLVPAHHVSPCYAYRDQAAGEADTQYAQRLADELEAKILELGPDSVAGFVAETVVGATAGAVPPVADYLKRIRAVCDKYGVLLILDEVMSGMGRTGYLFACEEDGVVPDIVTIAKGLGAGYQPIGAMLSTSRIYDAIIGGSGFFQHGHTYIGHATACAAALAVQRTIVEDKLLDNVLARGEQLRARLRESLGDHPNLGDVRGRGLFVGVEFVADRATKATLDPAKKTHAVLKRTCMEHGVLVYPMGGTVDGIHGDHVLFAPPFICTPTDIDNIVDRFTQAVKTVLPA

SEQ ID NO: 10911 - protein, 252 aa, Zea mays
MYRAKRAALSPKVKRRVGKYELGRTIGEGTFAKVRFAKNTENGEPVAIKILDKEKVKRHRLVEQIKREICIMKLVRHPNVVRLFEVMGSKARIFIVLEYVTGGELFEIIATNGRLKEDEARKYFQQLINAVDYCHSRGVYHRDLKLENLLLDAAGNLKVSDFGLSALTEQVKADGLLHTTCGTPNYVAPEVIEDGGYDGATADIWSCGVILFGLCWNLLLALKCENLLNLVGAKLGSFLSCSHLIDSTIKLF

SEQ ID NO: 10912 - protein, 188 aa, Rickettsia sp. APGEA35
IMLAAVGSLSAFYPDLLNFKEADYELTAIRMIAKIPTIAAMSYKYSIGQPFIYPDNSLDFTENFLHMMFATPCTKYKVNPIIKNALNKIFILHADHEQNASTSTVRIAGSSGANPFACISTGIASLWGPAHGGANEAVINMLKEIGSSEYIPKYIAKAKDKNDPFRLMGFGHRVYKNYDPRAAVLKET

SEQ ID NO: 10913 - protein, 615 aa, Zea mays
MRPRGGPARTRPLPRTAASFSFARRHPIRSSPPLRRSLSPRVVTRPRPPPSLSSFPLLKPPVRQPQWIFAPHLHPLAMAPPPASPADSAPDPRPTASAPVPITVPSPRDHAHHHHLVDRRDTPRGRAWEPERNRRGEAMDGAAAVKLVPGEAGYVLEDVPHVSDYLPDLPTYSNPLQDNPAYSVVKQYFVNPDDTVCQKIVVHKDGPRGNHFRRAGPRQKVYFEPDEVHACIVTCGGLCPGLNTVIREIVCGLSDMYGVTKILGIQGGYRGFYARNTITLTPKSVNDIHKRGGTILGSSRGGHDTVKIVDSIQDRDINQVYVIGGDGTQRGAGVIFEEVRRRGLKVSVAGIPKTIDNDIPVIDKSFGFDTAVEEAQRAINAAHVEAVSAENGIGLVKLMGRHSGFIAHYATLASRDVDCCLIPESPFYLEGEGGLFRYIEKRLKDNGHMVIVVAEGAGQKLIAETMQSIGKDASGNELLLDVGLWLSQKINEHFKKNKMTINLKYIDPTYMIRAIPSNASDNVYCTLLAHSVVHGAMAGYTGFTIGQVNGRHCYIPFYRITEKQNRVSITDRMWARLLSSTNQPSFLCNKVVEEAKKEHERATRLLDGSPSHRKG

SEQ ID NO: 10914 - protein, 396 aa, Triticum aestivum
MALSISAPTSSPFLPAPRQVGRWSSSPSSAKPAVFSLRRPVVVARAAAGNAPSSPAGAVVTELDVVSSFSEIVPDTVVFDDFEKFAPTAATVSSSLLLGIAGLPDTKFKSAIDTALVDGECNTMEKPGDRMSCYLTKALGNVGAELAHQVPGRVSTEIDARLAYDTQGIVQRVHELLQIYNEHDIPSERLLFKIPATWQGIEASRLLESEGTQTHLTFVYSFAQAAAAAQAGASVVQIFVGRIRDWAKNHSGDPEIDEALKKGEDAGLALVKKAYVYIHKNGYKTKLMAAAVRNKQDVFSLLGIDYIIAPLKILQSLDESVTDSDEKYGYVQRLTLSLDKMYNFSQEELVKWDQLSLAAAMGPAAEELLASGLEGYANQARRVEELFAKIWPPPNV

SEQ ID NO: 10915 - protein, 78 aa, Brassica napus
MGFWTLMEGLLLFANALAILNEDRFLAPKGWTLAELHQTGKRNSLKGQIVGLIHACQYMRLPLMLFNLIVIVVKLFSG

SEQ ID NO: 10916 - protein, 152 aa, Glycine max
YSDYQGGKILTGGSVLESGGNFVQPTIVEISPDAPVVKEELFGPVLYVMKFQTLEEAIALNNSVPQGLSSSIFTQRPGTIFKWIGPRGSDCGIVNANIPTNGAEIGGAFGGEKATGGGREAGSDSWKQYMRRSTCTINYGSELPLAQGINFG

SEQ ID NO: 10917 - protein, 533 aa, Glycine max
MGNCCRSPAAVAREDVKSSFSNADHGKRGGGGSASAAAKQKAPITVLAGVPKENIEDRYLVDRELGRGEFGVTYLCIDRDTRELLACKSISKRKLRTAVDVEDVRREVAIMRHLPESPSIVSLREACEDDNAVHLVMELCEGGELFDRIVARGHYTERAAAAVTRTIVEVVQLCHKHGVIHRDLKPENFLFANKKENSPLKAIDFGLSIFFKPGERFSEIVGSPYYMAPEVLKRNYGPEIDIWSAGVILYILLCGVPPFWAESEQGVAQAILRGLIDFKREPWPSISESAKSLVRQMLEPDPKLRLTAKQVLEHPWLQNAKKAPNVPLGDVVKSRLKQFSMMNRFKRKALRVIADFLSNEEVEDIKDMFKKMDNDNDGIVSIEELKAGFRNFGSLLADSEVQLLIEAVDSNGKGTLDYGEFVAVSLHLRRMANDDHLHKAFSYFDKDGNGYIEPDELRNALMEDGADDCTDVANDIFLEVDTDKDGRISYDEFVAMMKTGTDWRKASRHYSRGRFNSLSLKLMKDGSLNLGNE

SEQ ID NO: 10918 - protein, 198 aa, Triticum aestivum
LAGRVDAPRLDRPLLPSPRAPPSPSSSSIPMQQRRGRPSGTDGSDFSYRMVVDSRYQRVADGRSRLARLMLVQTLHQVAGGALLLLSLSKGTEINKFAVLSLAAGLLAILLGEFGRRRTVAVFLPLYTSLSSIAIAFSVTCIIRSDLFVKITKQNTADITSYEMFDVVRVALGILLQLVVITTSTRLLLILSALNGTP

SEQ ID NO: 10919 - protein, 342 aa, Burkholderia sp. NK8
MSSYNIALNFEDGVTRFVECKAGEKVLDAAFRAKINLPMDCSDGVCGTCKCRAESGSYDLGEDYIEDALSDDEKEGGLVLTCQMVPQSDCVIAVPASSTACKTAQSKFAAKVTKVAPHNDAAVVLELDVDAAASAPVFLPGQYVNIDVPGSGQHRSYSFSSAPGETKISFLIKKIPGGVMSTWLESAETGSTVELTGPLGSFYLRAVERPLLFLAGGTGLAPFLSMLEVLARANSQQKIHLIYGVTRDLDLVQVEAIEAYTAKLSNFTFSTVVADADSDHPRKGWVTQHMPAESLNDGDVDVYLCGPPPMVDAVRKHFDDNGVKPNSFHYEKFTPNAAPVTA

SEQ ID NO: 10920 - protein, 453 aa, Dechloromonas aromatica RCB
MSLSSNQDWLARSQAAVWHPCTQMQHHAQTASAAHLPLVPIARGSGAWLYDFDGKRYLDGISSWWTNLFGHANPRINAALKDQLENLEHVMLAGFTHQPVVELSERLSALTGGSLGHAFYASDGASATEIALKMSFHYWRNTGRPEKAEFLCLAGSYHGETVGALAVTDVAIFKDAYAPLVRAATVIPSPDSRLAEAGESPADVARRAAAALEAHLEKHGENIAALIVEPLVQGAAGMVMYDPEYLRLARQLCDRYEVHLICDEIAVGCGRTGTFFAHEQAANDGNPIRPDLMCLSKGISGGYLPLSIVLCSDTIYEAFLDDSVARAFLHSHSYTGNPLACRAALATLNIFESDDILAANRLKSAKISTALAPLADHPQVRHLRQRGMITAFDVETDDPYFSRRFYRATLGREALIRPIGNTVYLMPPYIISDDEIAHLGQSIAGSLQEALAK

SEQ ID NO: 10921 - protein, 489 aa, Magnetospirillum magnetotacticum MS-1
MILKDSSLLKSRAFVNGAWTDADNGATFDVLNPATGEILASVPDMGAAEARRAIEAANAAWPAWKAKTGKERGAILRNWFNLIMAHQEDLAVLLTAEQGKPLAEARGEIAYGASFIEWFAEEAKRVYGDTIPGHAPDKRIVVVKEPIGVVAAITPWNFPNAMITRKCAPALAVGCPVVVKPAEDTPLSALALAELAVRAGIPAGIFNIVTARHGALVGGELSGNPLVRKLSFTGSTQVGKLLMSQCAATVKKVSLELGGNAPFIVFDDADLDAAVAGAMASKYRNAGQTCVCANRMLVQDGVYDEFARRLAKAVSQLKVGDGLASDANQGPLINAKAVEKVERMLADAVSKGATIVCGGKRHALGRTFFEPTIVTNVTSTMSMAREEIFGPVAPLFRFKTEAEAIAMANDTEFGLAAYFYAGNIARVWRVAEKLEYGMVGINDGIISTEVAPFGGVKESGIGREGSKYGIEDFLEIKYLCLGGIKEAAQ

SEQ ID NO: 10922 - protein, 295 aa, Zea mays
  unsure (1)..(295): unsure at all Xaa locations
PLWRRTRRSWTREEDKAFEXNAVAAAAAPPADGPPDDGWFTALVASVPARTXEEVRLHYEALVEDVAAIEAGRIPLPRYAGEESSAATPXGSGAAGPSTPKDGGGGSGHRREERKGGVGADAGKSCSKAEQERRKGVPWTEEEHRLFLLGLDKFGKGDWRSISRNFVISRTPTQVASHAQKYFIRLNSMNRDRRRSSIHDITSVTAGEVAAAGAPITGXXARPRRGQMPMGPGGMKHHHPVPPMGMYGHAPMGHPVAGHMVAPAAVGTPVMFPPGHHSPYVLPVGYPAPPTKMHQ

SEQ ID NO: 10923 - protein, 258 aa, Candida albicans SC5314
MSSYTELPQSAPPYSEGESGSPPRQFGDNIPDDFKYSVSVASCELPLRQLFIRKVYSLLTIQLMGSVIMGFIIRSSDSFKIWAMTNTWLLILSFIGSIGFMIGAFFKARSYPINLILLGGFTICESYTLGVACAFIESSILIEAILLTLIIFIGLTIFAFQTKYDFISWQGTVGMMLWGLIGWGFVMMFIPHQQNSMMENVYSFLGALIFSIYIIIDTQQIMKTLHLDDEIIGCISLYLDIINLFLFILRILNNNRDD

SEQ ID NO: 10924 - protein, 376 aa, Zea mays
  unsure (1)..(376): unsure at all Xaa locations
MGSTAGDVAAVVDEEACMYAMQLASSSILPMTLKNAIELGLLEVLQKEAGGGKAALAPEEVVARMPAAPSDPAAAAAMVDRMLRLLASYDXVVRCQMEDRDGRYERRYSAAXVCKWLTPNEDGVSMGXALALMNQDKVLMESWYYLKDAVLDXGGIPFNKAYGMTAFEYXHGRTRRFNRVFNEGMKNHSXVIITKKLLDFYTGFEGXVSTLVDVGRPAWGATLHAITSRHPHISXGVNFDLPHVISEAPPXFPGVRHVGGDMFASVPAGXDAILMKWILHDWSDAXHCATLLKNCYDALPENGKVIVVECVLPVNTEATPKAQGVFHVDMIMLAHNPGGKERYEREFREXLPRGAGFSGFKATYIYANAWAIEFIK

SEQ ID NO: 10925 - protein, 367 aa, Saccharomyces cerevisiae
MHINVRGTRKIISNVSSFTPRYEFPKYSMPLTDFKGHQVKALKTFEKLLPQMNMIIELRDIRAPLSTRNVVFDRIARKEHDVMKLVVYTRKDLMPGNKPYIGKLKNWHEELGEKFILLDCRNKTDVRNLLKILEWQNYELETNGGYLPMGYRALITGMPNVGKSTLINSLRTIFHNQVNMGRKFKKVAKTGAEAGVTRATSEVIRVTSRNTESRNEIYLIDTPGIGVPGRVSDHNRMLGLALCGSVKNNLVDPIFQADYLLYLMNLQNLNDGRTELYPGSTNSPTNDIYDVLRRLQVNKSQNEKSTAIEWTNKWRLHGKGIIFDPEVLLNNDEFSYKNYVNDQLEKLGDLSYEGLSNKLKGNPNQVF

SEQ ID NO: 10926 - protein, 364 aa, Glycine max
MGKGGMSIDEHGEGKEENMAAWLVGMNTLKIQPFKLPTLGPHDVRVRMKAVGICGSDVHYLKTLRCAHFIVKEPMVIGHECAGIIEEVGSQVKSLVPGDRVAIEPGISCWHCNHCKHGRYNLCDDMKFFATPPVHGSLANQIVHPADLCFKLPDNVSLEEGAMCEPLSVGVHACRRANIGPETNVLIMGAGPIGLVTMLAARAFGAPKTVIVDVDDHRLSVAKSLGADDIIKVSTNIKDVAEEVVQIQKVMGAGIDVTFDCAGFDKTMSTALSATQPGGKVCLVGMGHSEMTVPLTPAAAREVDVVGVFRYMNTWPLCLEFLRSGKIDVKPLITHRFGFSQKEVEEAFETSARGGNAIKVMFNL

SEQ ID NO: 10927 - protein, 349 aa, Methanosarcina mazei Go1
MENGMHHNVFTNTPTIPIDVKDRSVSELMDGMLRTGFQGRKLAESVQAWSNMLKEKDTTVLMGLSGAMVPAGMRRVISYLIRERMIDCLVSTGANLFHDSHEALGRKHYVGSHLANDEKLFEHGVDRIYDVFAVEEEFRNADNLIADFAEEIGEISCSSREFMYLLGKELVRRGAAEDSIVVSAYRHNVPIFVPALSDSSIGIGLTIARRRGLKLEIDQIKDVDEITQIVEKSGHTGVVYVGGGVPKNFIQQTEVIASILGMDVPGHEYAIQYTSDSPHWGGLSGCTFDEAVSWGKVAAQAKKVQVFVDATIALPIVAHALHEKTRGVKRTAPVFSWDGPEGLEIAYNE

SEQ ID NO: 10928 - protein, 543 aa, Glycine max
  unsure (1)..(543): unsure at all Xaa locations
MVSPISHLVTLILLLSVSLAASASLEENFVQCLSFYSDKAAPFYASIYTPQNASFNKILESSAQNLRYLVPSAPKPELIFTPLTDSHVQVAVTCSKKLGIHLRIRSGGHDYEGLSYVSEVESXFIIVDLSKLRAVDVDIEDNTAWIQAGATIGEVYYKIYEKSSVHGFPAGLCTSLGVGGHITGGAYRPMMRKYGLGADNVVDARIVDANGQILDREAMGEDLFWAIRGGGGASFGILLWWKIKLVPVPETVTVFTVTRSLEQDATKILHRWQEVAPYIDEDLFIRVIIQPATVGNKTERTITTSYNAQFLGGADRLLQVMKESFPELGLTKKDCLETSWIKSVLYIAGYPNDTPPEVLLQGKSTFKNYFKAKSDFVRDPIPETGLEGLWQRLLEEDSPLMIWNPYGGMMSKVSESDIPFPHRNGTLYKIQYLTLWQDGDKNASKHEDWIRKLYNYMTPYVSKFPREAYVNYRDLDLGMNKKNSTSYIQATAWGNMYFKDNFNRLVKIKTKVDPDNVFRHEQSIPPLPVSSMRLKDKKCKTWE

SEQ ID NO: 10929 - protein, 509 aa, GIBBERELLA ZEAE PH-1
MTFPSDIHTFHSGRPQPESSSKSNTFVSVDPSNAKPLATIYTTTSEQLNQTVAAAQAAFPAWSQTPAPRRAAILLKAASILRERNDELALTETLDTGKPWSETSTVDVVTGADVLEYYAHMAAGSFPGQNTRLRPDAFVLTTHEPLGVCAGIGAWNYPIQIALWKSAPCLAAGNCMVYKPSEVTPLHAETLAQIYIEAGVPPGVFNVVYGDGIAVGAPLVAHSGIAKVSFTGQVSTGSKVASQAVTDMKGVTMELGGKSPLVILPDADVEDAADTAMVANFFSTGQVCTNGTRVFVPDTLLSQVEEAIVQRCREGIRMGLPRKTETNFGPMVSAAQQEKVKMYIQHGRTVDKAKVLFNGSQEASMPQPTSDGFWVHPVVFTNCTDDMRVTREEIFGPVMCIMPYKTQGRPRQEWLSDLIARANDTPMGLAAGVVSSDVGLAQEVVQKLDAGITWINTWGESPAEMPVGGWKMSGIGLENGHEGISAYMRTKSTLIQLGRGACKGVFSKL

SEQ ID NO: 10930 - protein, 303 aa, GIBBERELLA ZEAE PH-1
MADQHEVDLDSIIDRLLEVRGSRPGKQVQLLEAEIRYLCTKAREIFISQPILLELEAPIKICGDIHGQYYDLLRLFEYGGFPPEANYLFLGDYVDRGKQSLETICLLLAYKIKYPENFFILRGNHECASINRIYGFYDECKRRYNIKLWKTFTDCFNCLPIAAIIDEKIFTMHGGLSPDLNSMEQIRRVMRPTDIPDCGLLCDLLWSDPDKDITGWSENDRGVSFTFGPDVVSRFLQKHDMDLICRAHQVVEDGYEFFSKRQLVTLFSAPNYCGEFDNAGAMMSVDESLLMAAKTRQSIPSPR

SEQ ID NO: 10931 - protein, 462 aa, Listeria monocytogenes EGD-e
MFKTNVEQNNVPVFGSFESGQDLPEKRMNKESVDPRIAYQLVKDQLIDEGSARQNLATFCQTYMEPEAEQIMAETMEKNAIDKSEYPQTAKLESSCVNMLADLWNVDESEHYMGTSTVGSSEACMLGGMAMKFRWRSAALKNGLDIHAKKPSLVISSGYQVCWEKFCVYWDIELREVPMSEEHLSINTDIIMDYVDEYTIGIVGILGITYTGKFDDIMTLNDLVEDYNNTHDNEVVIHVDGASGAMFTPFVEPGLEWDFRLPNVVSINTSGHKYGLVYPGVGWILWRDKEYLPEELVFDVSYLGGHMPTMAINFSRSASQIIGQYYNFLRFGYEGYRQIHMRTRDGALQLSQAVAETGLFEIYNDGANLPIVCYKLKDDANVAWTLYDLADRLQMKGWQVPAYPLPKEMGNTIIQRYVCRGDLGQNMVTAFKNDLSESIEELNNAHILYHDVNTSKTHGFTH

SEQ ID NO: 10932 - protein, 509 aa, Zea mays
  unsure (1)..(509): unsure at all Xaa locations
MATANGSSKGSFEVPKVEVRFTKLFIDGKFVDAVSGKTFETRDPRTGEVIASIAEGDKADVDLAVKAAREAFDNGPWPRMTGYERGRILHRFADLIDGHVEELAALDTVDAGKLFAVGKARDIPGAAHLLRYYAGAADKVHGATLKMAQRMHGYTLKEPVGXVVGHIVPWNYPTTMFFFKVGPALAGXGAPVVVKPAEQTPLSALFYAHLAREAGVPAGVLNVVPGFGPTAGAAVAAHMDVDKVSFTGSTEVGRLVMRAAAESNLKPVSLELGGKSPVIVFDDADLDMAVNLVNFATYTNKGEICVAGTRIYVQEGIYDEFVKKAAELASKSVVGDPFNPSVSQGPQVDKDQYEKVLRYIDIGKRXEGATLVTGGKXPCGDNKGYYIEPTIFTDVKDDMTIAQDEIFGPVMALMKFKTVEEVIQKANNTXRYGLAAGIVTKNIDVANTVSRSIRAGAIWINCYFAFDPXDAPFGGYKMSGFGKDMGMDALDKYLQTKTVVTPLYNTPWL

SEQ ID NO: 10933 - protein, 214 aa, Arabidopsis thaliana
MMSELDLGTSQRMTETHRTTTTFLDLLRRQMSGHDLTRRKRTLKERLRFKCIGCCGPTWNLRLTNNTTLHSPTSRDDEIEELQIETGLVLESDHGSGTGMNLATALEAERYNRGESTEAEADMTPRRVSLMRLLEETAEKIVDDDGKETEILTASIGTLTGNDSVCCVCMGRKKGAAFIPCGHTFCRVCSRELWLNRGSCPLCNRPIIEILDIF

SEQ ID NO: 10934 - protein, 589 aa, Glycine max
MSSASLKEMRNGGEDYSNGHGGGGVRDLYGEDCATEDQLITPWTFSVASGCSLLRDPRYNKGLAFTEGERDAHYLRGLLPPAIFNQELQEKRLMHNLRQYEVPLHRYMAMMDLQERNERLFYKLLINNVEELLPVVYTPTVGEACQKYGSIFRRPQGLYISLKEKGKILEVLKNWPEKSIQVIVVTDGERILGLGDLGCQGMGIPVGKLSLYTALGGVRPSSCLPITIDVGTNNEKLLNDEFYIGLKQKRATGQEYAELLEEFMHAVKQNYGEKVLIQFEDFANHNAFDLLEKYSSSHLVFNDDIQGTASVVLAGLLASLKLVGGTLVDHTFLFLGAGEAGTGIAELIALEISKQTKAPVEETRKKIWLVDSKGLIVSSRLESLQQFKKPWAHEHEPVKSLLDAVKAIKPTVLIGSSGAGKTFTKEVVETMASLNEKPLILALSNPTSQSECTAEEAYTWSKGKAIFASGSPFDPVEYEGKLFVPGQANNAYIFPGFGLGLIISGAIRVRDEMLLAASEALAAQVSQENYDKGLIYPPFSNIRKISAHIAAKVAAKAYDLGLASHLPRPKDLVKYAESCMYSPGYRSYR

SEQ ID NO: 10935 - protein, 360 aa, Lolium perenne
MGSTAADMAASADEDACMFALQLASSSVLPMTLKNAIELGLLEILVAAGGKSLTPTEVAAKLPSAANPEAPDMVDRILRLLASYNVVTCLVEEGKDGRLSRSYGAAPVCKFLTPNEDGVSMAALALMNQDKVLMESWYYLKDAVLDGGIPFNKAYGMSAFEYHGTDPRFNRVFNEGMKNHSIIITKKLLELYHGFEGLGTLVDVGGGVGATVAAIAAHYPTIKGVNFDLPHVISEAPQFPGVTHVGGDMFKEVPSGDTILMKWILHDWSDQHCATLLKNCYDALPAHGKVVLVQCILPVNPEANPSSQGVFHVDMIMLAHNPGGRERYEREFQALARGAGFTGVKSTYIYANAWAIEFTK

SEQ ID NO: 10936 - protein, 351 aa, Lolium perenne
MADEEACMFALQLANSAVLPMAIRTSIELGLLETLVGAGGKLLTPEEAVKKLPSKAKHPDAASMIDRMLRVLASYKVVTCEVEEGKDGSLSRRYGATPVCRWLAPNEDGASMAPFALLTQDRVFMEAWCHMKDAILEGGSAFHRAFGTSWFEYAGQDARFNRLFNEAMEHHSVILTKKLLELYKGFDGIGTLVDVAGGVGAVIHAITSKYPSIKGINFDLPHVIADAPPYPGVEHVSGDMFKKMPSGDAILMKWILNCFSDDECATLLKNCYDALPAHAKVINVECILPVNPDATNGAQALIAVDLSLLVYSPGGKERYHRDLEKLAKGAGFTSVTATYIFADFWAMEYTK

SEQ ID NO: 10937 - protein, 95 aa, Glycine max
TDRPVGPWLKVKNPEHWAKRSSLKDVIADAFLQQILLRPAEYDVIACMNLNGDYISDALAAQVGGIGIAPGANIGDECALFEATHGTAPKYAGQD

SEQ ID NO: 10938 - protein, 361 aa, Lolium perenne
MGSTAAEIAASADEEACLYALQLGSSSILPMTLKNTIELGLLETLMAAGGKSLTPTEVAAKLPCAAKNPEAPDMVDRMLRLLASYNVVSCLVEEGTDGRLSRRYGAAPVCKFLTPNEDGVSMAALALMNQDKVLMESWYYLKDAVLDGGIPFNKAYGMSAFEYHGTDPRFNRVFNEAMKNNSIIITKKLLQLYDGFQGLGTLVDVGGGVGATVAAITAHYPTIKGINFDLPHVISEAPPFPGVTHVGGDMFKKVPLGDAILMKWILHDWSDQHCGTLLKNCYDALPMHGKVVLVECILPVNPEAKPSSQGVFHVDMIMLAHNPGGRERYEREYEALARGAGFAGFKSTYIYANAWAIEFTK

SEQ ID NO: 10939 - protein, 207 aa, Zea mays
MAMPDLTATVIQISGPRGELPVLGAGRRRCVWQFNFREFDDARDIFASDSIELLRRSGIDLRLNAERGVDARRFAELLMSSGVVLNDSVYWVTFHAGYDFGYLLKILTCNCLPDTQAGFFKLMKIYFPTVYDIKHLMKFCNSLHGGLNKLAELLDVERVGESHQAGSDSLVTSCAFWKLKDSFFTGSTEKYAGVLYGLNAEIDVSAH

SEQ ID NO: 10940 - protein, 386 aa, Parachlamydia sp. UWE25
MSEVLFEITKESLETGLRGYPVGYCTTSSVDPVKGLFYAGHPVSEIDQWEPEQVIYLLYHGYVGKPEEVSRFSQDLLIRANCSTALIESIEKLPRNIHPMKLFSIALLLASGFEGKNDYHEDYLNLIAKVPEIAATVINHHAGWGKTKQSQPQLGYMENFTQMLNVPDANQQELARAFKFFNVLHYDHGGGNLSAFVGKAVASGLEDLYGSMSAAMCALAGPRHGKANQDCLTFVHQLVEELGEHSTEEELERLIRAHLDKGELIFGFGHAVLRVEDPRATLLYEVTNQYYASHALVKMAQLLRKVGSKVLQNNPKISDPYPNVDAISGILLTAAGFPCSEYYTVLFGLARVVGIGRQIVYERKEAREGKGTPIVRPKYFFKENKQ

SEQ ID NO: 10941 - protein, 459 aa, Glycine max
  unsure (1)..(459): unsure at all Xaa locations
MDRRTGSTRNILFNKYEIGKLLGQGNFAKVYHGRNLSTNESVAIKVIKKERLQQKERLVKQIKREVSVMSLVRHPHIVELKEVMANKAKIFMVVEYVKGGELFAKVAKGKMKEDVARKYFQXQLISAVDFCHSRGVTHRDLKPENLLLXDENEDLKVSDFGLSALPDQRRSDGMLLTPCGTPAYVAPEVLKKKGYDGSKADIWSCGVILFALLSGYLPFQGENVMRIYSKSFKADYAFPEWISPAAKNLISNLLVVDPQKRYSIPDIMKDPWFQIGFLRPIAFSMKESALEDNIDFSGDDVPSPGSDDGNSSSNNEDGELTGAKPARPSYNAFEIISSLSHGFDLRNLFETRKRSPSMFISKFSASAVMAKLEGVAKKLNFRVTGKKEFVVRMQGATEGRKGKLAMTVEVFEVAPEVAVVEFAKSAGDTLEYIKFCEDQVRPSLKDIVWSWQGDANCHQ

SEQ ID NO: 10942 - protein, 178 aa, Oryza sativa (japonica cultivar-group)
MYLLSPRNGDEEDEQEEIQELISDDEPPNLKLASCATAASSSSSSGSDMEKGRGKACGGGSTAPPPPPPSSSGKSGGGGGSNIREAAASGGGGGVWGKYFSVESLLLLVCVTASLVILPLVLPPLPPPPSMLMLVPVAMLVLLLALAFMPTTTSSSSSAGGGGGGGRNGATTGHAPYL

SEQ ID NO: 10943 - protein, 256 aa, Glycine max
  unsure (1)..(256): unsure at all Xaa locations
CSQLQSYWLQVAVCRQFKPVTLELGGKSPFIVCKDADVDAAVEASHFALFFNQGQCCCAGSRTFVHESIYGEFVEKAKARALKRVVGDPFKNGVEQGPQIDSVQFEKIMKYIRSGVESGAQLESGGQRIGSKGYYIQPTVFSNVQDNMLIAKDEIFGPVQSILKFKDLEEVIRRANATSYGLAAGXFTKNMDTANTLMRALQAGTVWINCYDVFDAAIPFGGYKMSGQGRVRGIYSLRSYLQVKAVVTALKNPAWL

SEQ ID NO: 10944 - protein, 116 aa, Hevea brasiliensis
MAALKMVSFLVLCMLVAAPMTAQAITCGQVQSALVPCLSYLKTTGPTPPATCCNGVRTINNAAKTTADRRTACQCLKSAAGSVKGLNPTTVAGLPGKCGVNIPYKISLSTNCATVK

SEQ ID NO: 10945 - protein, 180 aa, Medicago sativa
MALISSAAVTTVNRASSAQANLVAPFTGLKSSAGFPVTKKTNNDITSIASNGGRVNCMQVWPPVGKKKFETLSYLPPLTEEQLAKEVEYLIRKGWIPCLEFELEKGFVYRENHRSPGYYDGRYWTMWRLPLFGATDSSQVLKELADCKAEYPDSFIRIIGFDNVRQVQCISFIAHTPKNY

SEQ ID NO: 10946 - protein, 357 aa, Agrobacterium tumefaciens str. C58
MRALRFHAAKDLRIEDIAEPKRPGPGQVLVRNRFVGICGTDLHEYSYGPIFIPTEPHPFTGAHGPQILGHEFGGVVEAIGDGVTSVNVGDRVSIQPLIMPRSGDYFADRGLFHLSTQLALVGLSWDGGGMAEAALVNEYNVQKIPDEMTDEEAALVEPSAVAVYACDRGGVTAGNSVLVTGAGPIGMLTLLAARAAGATQLFVSDLNDARLELARNVIRDVITINPKRDNVGDVVRSATEGKVGCDVAIECVGNEHALKACVDAVRKQGVVVQTGLHPHENPIDWFQVTFRDLEIKGSWAYPTHYWPRVIRLIASGLLPATKIVTKRITLDTAVTEGFDALLDPAGTHLKILIDLSK

SEQ ID NO: 10947 - protein, 395 aa, Zea mays
MEVAMVVSARASLLILVLSLCSPYKFIQSPMDLGPLNLLPTTSTAAASSDFGRILFRAPAAVLRPQSPRDISMLLSFLSGSPSLSRVTVAARGAGHSIHGQAQAPDGIVVETRSLPGEMEFHHVRGGGEGRASYADVGGGVLWIELLERSLKLGLAPRSWTDYLYLTVGGTLSNAGISGQTFKHGPQISNVLQLEVVTGLGQFGIITRARILLQEAPEKVTWVRAFYDDLGAFTRDQELLVSIPDSVDYVEGFMVLNERSLHSSSIAFPASVDFSPDFGTRSSPRIYYCVEFAVHHHHGYQKQSQAAVEAISRRMSHMASQLYSVEVSYLDFLNRVRMEEVSLRSAGMWEEVHHPWLNMFVPKPGVAGFRDLLMDNVSPDSFQGLILIYPLLRDK

SEQ ID NO: 10948 - protein, 176 aa, Neurospora crassa
MGYYDDDAHGHVEADAAPRATTGTGTGSASQTVTIPCHHIRLGDILILQGRPCQVIRISTSAATGQHRYLGVDLFTKQLHEESSFVSNPAPSVVVQTMLGPVFKQYRVLDMQDGSIVAMTETGDVKQNLPVIDQSSLWNRLQKAFESGRGSVRVLVVSDHGREMAVDMKVVHGSRL

SEQ ID NO: 10949 - protein, 97 aa, Zea mays
MDEEEHEVYGQEIPEDGDMDGADVDMAASGDDAAKLQELDEMKRRLKEMEEEAAALRDMQAKVAKEIGEIEPTNHGTAWQPCPAPPTAPACPFPCVT

SEQ ID NO: 10950 - protein, 207 aa, Methanococcoides burtonii DSM 6242
MAFQIVFAAIALAILTSGVAERIKLSSFIVFGLLWTTLVYDPLAYWAWGDGWVGSMGALDFAGGTVVHISSGFGALALSFVIGKRIGFGKYSMEPENITTTLLGGALLWFGWFAFNAGNALAANAFVVTLISASSGALTWMGASWIKGKSSSLGMNSGAIAGLVAITPACGFVGPLAAIIIGGSAGILCYGTLLFCIYKKFDESLDA

SEQ ID NO: 10951 - protein, 354 aa, Oryza sativa (japonica cultivar-group)
MTPAADGDDDETTCIRALELIFTFVVPMTLKATIKLGLLDALTGGGHALTADELAAAAQLPAEAASSVDRMLRLLASLDVVKCAPTDTGGEAAVRRYTPAPVCRWFAGERSLAPLAMFLLDDDYLSTWNQLPAAVAGGDGQVAFEKARGMPMFEYMGTNRRLNTLFNQAMVQQSTVVIGKLLERFQGFDGVSVLVDVGGGTGATLEMITSRYKNITGVNFDLPHVIAQAPSLPGVKHIAGNMFESVPNGDAIFLKSMLHLHNDEDCIKILKKCHQALTHNGKVIAVEILLPAIPEPVPTAQNPFRMDMIMLNNHWGGKERTEPEFAKLAVECGYTGVFQATYIFANYWALEFSK

SEQ ID NO: 10952 - protein, 406 aa, Azospirillum brasilense
GFAGDAAARYSSTLGVAAVTYGAGAFNMVNAVAGAYAEKSPIVVISGAPGTTEGNAGLLLDHQGRTLHTQFQVFKEITVAQARLDDPAKAPAEIARVLGAARALSRPVYLEIPRNMANAEVEPVGDDPAWPVDRDALAPAPDEVLAAMRSATSPVLMVCVEVRRYGLEAKVADVAHGLGVRSVTTFMGRGLLADAPTPPLGTYIGVAGDAEITRLVEESDGLFLLGAILSDTNFAVSQRKIDLRKTIHAFDRAVTLGYHTYADIPLDGLVDALLERLPPSDRTTRGKEPHAYPTGLQADDGPIAPMDIARAVNDRVRAGQEPLLIAADMGDCLFTAMDMIDAGLMAPGYYAGMGFGVPAGIGAQCVSGGKRILTVVGDGAFQMTGWELGNCRRLGIDPIVILFNNA

SEQ ID NO: 10953 - protein, 308 aa, Triticum aestivum
NIQVDPSGQVQWLQQQLVPQLQQPLSQQPQQTFPQPQQTFPHQPQQQVPQPQQPQQPFLQPQQPFPQQPQQPFPQTQQPQQPFPQQPQQPFPQTQQPQQPFPQQPQQPFPQTQQPQQPFPQLQQPQQPFPQPQQQLPQPQQPQQSFPQQQRPFIQPSLQQQLNPCKNILLQQCKPASLVSSLWSIIWPQSDCQVMRQQCCQQLAQIPQQLQCAAIHSVVHSIIMQQQQQQQQQQGMHIFLPLSQQQQVGQGSLVQGQGIIQPQQPAQLEAIRSLVLQTLPSMCNVYVPPECSIMRAPFASIVAGIGGQ

SEQ ID NO: 10954 - protein, 228 aa, Pisum sativum
PVYISISCNLAGIPHPTFSREPVPFSLSPKSSNQMGLEAAVEAAAEFLNKAVKPVLVAGPKLRVAKASEAFTELADKSAYPYAVMPSAKGLVPENHQHFVGTFWGAVSTSFCAEIVESADAYLFAGPIFNDYSSVGYSLLLKKEKSIIVEPNRVVIGNGVAFGCILMKDFLSALAKRIKRNNTAYENYHRILVPEGVPVESEPREPLRVNVLFQHIQNMLSSKTAVIA

SEQ ID NO: 10955 - protein, 400 aa, Zea mays
  unsure (1)..(400): unsure at all Xaa locations
ACLQAVIKRLMTDVPFGVLLSGGLDSSLVASVTKRHLVKTDAAGKFGTELHSFVVGLENRARDGTLTFFFTSLSTTDRPARTFQGSPDLKAAREVADYLGTTHHEFHFTDGIDAIEEVIYHDETYDVTTIRASTPMFLMARKIKSLGVKMVLSGEGSDELLGGYLYFHFAPNKEEFHRETCRKVKALHQYDCLRANKATSAWGLEVRVPFLDKEFINVAMGMDPEWKMYDKNLGRIEKWVMRKAFDDDEHPYLPKHILYRQKEQFSDGVGYNWIDGLKSFTEQQVTDEMMNNAAQMFPYNTPVNKEAYYYRMIFERLFPQDSARETVPWGPSIACSTPAAIEWVEQWKASNDPSGRFISSHDSAATDHTXAVSRRWPTAAATAPXNGTVNGKDVAVAIAV

SEQ ID NO: 10956 - protein, 177 aa, Triticum aestivum
  unsure (1)..(177): unsure at all Xaa locations
MGPPVMASLATXRGRFQGCKSSAALPVSARSNGASLGGVSNGGRIRCMQVWPIEGIKKFETLSXYLPPLSTEALLKQVDYLIRSKWVPCLEFSKVXGFIFREHNTSPGYYDGRYWTMWKLPMFGCTDATQVINEVEEVKKEYPDAYVRIIGFDNMRQVQCVXLIAFTPPPSEESGKA

SEQ ID NO: 10957 - protein, 295 aa, Candida albicans SC5314
MPAQLQVNTDYFTLNNGNKIPAVGLGTWQATNEDEAYRAVLAALKNGYKHIDTAAIYGNEEQVGKAIKDSGVPREELFVTTKLWNADHKNIEEALETSLKKLGLNYVDLYLIHWPASIDKSTNKPYTDFDYVDTYRGLQKVYKNSKKIRAIGVSNFTKKKLERLLSSEGVDVVPAVNQIEAHPLLTQPELYDYLKEKGIVLEAYSPLGSTNSPLFKNETIVKIAEKNGVEPAQVLVSWAIQRKTVVLPKSVTESRVISNLKTFTLPSEDFETLNKLSEKDGVVRTCNPAFNNFDD

SEQ ID NO: 10958 - protein, 289 aa, Candida albicans SC5314
MSAQLKTNNDRIALNNGNKIPVIGLGTWESNKDAFLTALKLGYRHIDTATIYKNEEQVGQAIKESGIPREELFITTKVWNNDHKNVEQALETSLKKLGLDYVDLYLVHWPVSIDKTTKEPYPDYDYVDTYKELQKIYKTTTKIKSIGVSNFTKSQLERLLSADGVDVVPAVNQVEAHPLLPQPELYEYLKEKGITLEAYSPLGTSSSPLIKNKTIVEIADKNGVDPAQVLISWAVQRKTVVLPKSVTESRLVSNLKTFELSAEDFDTLNKLSEKEGITRIINPFKNFQD

SEQ ID NO: 10959 - protein, 354 aa, GIBBERELLA ZEAE PH-1
MSLPSTMKAVVFDGLYKISVQDRPVPQIRDGRDIIIKVHAAGLCGSELHIYRGHQPSGTGFIMGHEFTGTVVQVGSDVKTIHIGDKVVAPFTASCGNCFFCNNGCSARCVESQLFGCEILNGGQAEYVRIPMADGTAVKAPETISDEALLLMADIFPTGFYGVKSAMELVPSQNIQEATMVVVGCGPVGLCAILAATHFKPRHLFAIDSVESRLEQARKLGAEPLNFETDRAGLEARIREVTEGRGADMVVEVVGQAPALRTAFDIVRPFGAISSIGVHNKEIPWTGDDAYTRNIRVQMGRCPVRSVFNEALHLLEQKQDKIGFLFDHKMPLAQAPEGYTLFEQRKTQKVVFTL

SEQ ID NO: 10960 - protein, 506 aa, Lithospermum erythrorhizon
MALPAIPLAIIIFLIISYKLYQKLRLKLPPGPRPLPIIGNIYQVKPVKFRCFYNWSKTYGPIFSIYYGSQMNVIVSTTELAKEVLKENDQHLADRFRTRSSASMSRGGKDLIWADYGPHYVKVRKLCNVELFSPKRLEAIRPMREDEYTALVESIYKDCTKPELKGKSLLVREYLSSVAFNNITRLAFGKRFMDSNGVVNEQGQEFKKITHDGIKITAKLSIAEYIPWIRWMFKVEQDALDKFAADRDHLTRVIMEEHIKSGNTKQHFVDALLTLQKQYDISEDTIIGLLWDMIAAGMDTATISTEWAMAELVRNPRVQRKAQEELDRVVGPDRIMTEADVPKLPYLQCIVKESLRLHPPTPLMLPHRASANVKIGGYDIPKGSIVHVNVWAIARDPAYWKNPEEFRPERFMEEDIDMKGTDYRLLPFGAGRRICPGAQLAINLITSSLGHLLHQFTWSPQPGVKPEEIDLSENPGTVTYMRNPVKAVVSPRLSAVHLYKRVESDM

SEQ ID NO: 10961 - protein, 449 aa, Xylella fastidiosa Dixon
MNPTLIVNARLVNEGREFDSDLRIENGRIARIDTGLSAQSKDIVIDAAGRRLLPGMIDDQVHFREPGLTHKGDIASESAAAVAGGLTSFMDMPNTNPPTLGAAALQAKYDAARGRAWGNYGFYLGASNDNLAAIQALDPKTSPGIKVFMGASTGNMLVDNETTLEGIFRHAPTPIITHCEDTPTINATLAKYHSRYGNTLSAEQHPDIRSRQACLKSSQLAVSLAKKNGTRLHVLHISTADELRLFEAGPLVDAAGKRRKQITAETCIHFLHFDRMDYARLGNLIKCNPAIKEASDREALIAALAKDVIDVLATDHAPHTWEEKQQPYAQAPSGLPLVQYALVAALELVHAGRLSVTEIVRKFAHAPAQLFDVTERGFLREGYWADLVLVEDTPFTVKRQEILSKCGWSPFEGATFRSRIASTWVNGNHVWDGNRLVGVPNGQRLEFDR

SEQ ID NO: 10962 - protein, 695 aa, Glycine max
  unsure (1)..(695): unsure at all Xaa locations
MPVLACCVDACSXPPGYAFAGDISFPAXPIAFTGVXPPATADDTNNSNNHWSPSLSAALYNVDGWGGPYFAVNTAGNISVRPHGSDTVSHQEIDLLKIVKKASDPKSLGGLSLQLPLIARFPDVLKNRLESLQSAFDYAIQSGGYESHYQGVYPVKCNQDRFVVEDIVKFGSPFRFGLEAGSKPELLLAMSCLCKGNPDGLLICNGFKDAEYISLALVANKLALNTVIVVEQEEEVDLIVELSKKLCIKPVIGLRAKLRTKHSGHFGGIFRRRGKFGLTTARVLRVVKNLDLAGMLDCLQLLHFHIGSQIPSTALLADGVGEAAQIYCELVRLGANMRVIDIGGGLGIDYDGSKSCDSDISVEYGLEEYAAAVVHAVQCVCDRSVKHPVICSESGRAIVSHHSVLIFEAVGTSSTNGGGAPPALSAHYLAEELSEDYGYLSELAFRGDYETCLVYTEEMKERCVEQFKQGTVCMEQLAAVEGLCELVRKAVGAAESVRRYHVNLSIFTSVPDAWGIEQVFPIIPIHRLDEKPSVRGILSDLTCDSDGKIDKFINGESSLPLHEMEGGRTYYLGMFLGGAYEEALGGVHNLFGGPSVVRVSQSDGPHSFAVTRAVPGPSCGDVLRVMQHQPELMFETLKHRAQEYVSHDNAAALLAAGLARTFDRMPYLLSLSSFVADDVAAAVPAAQDLGEQWSY

SEQ ID NO: 10963 - protein, 114 aa, Brassica napus
MAIKNSFSLLLSSLMVFALIAIPTISGQPSGTWCVANPKIQDPVVQAALGWACQQSEAYCSRIQLGQNCYSPNTLRDHASVVFNTYYQQNKNQPGSCDFNSAAVITNTDPSHDT

SEQ ID NO: 10964 - protein, 196 aa, Schizophyllum commune
MQAIKCVVVGDGAVGKTCLLISYTTNAFPGEYIPTVFDNYSANVMVDGKTISLGLWDTAGQEDYDRLRPLSYPQTDVFLICFSLVSPPSFENVRTKWYPEISHHAPQTPVVLVGTKLDLREDPATIEKLRDRRMSPIQYSQGVAMMKDIGAVKYLECSALTQKGLKTVFDEAIRVVLYPSARSDNKRSKGRSCIVA

SEQ ID NO: 10965 - protein, 168 aa, Zea mays
IALLLGLKGIHFVDEDGNDFCLVSVDDEYIIIGSANINQRSMDGARDSEIAMGAYQPYHLATRQPARGQIHGFRMSLWYEHLGMLEDVFQRPESVECVQKVNEVAEKYWDLYSSDDLEQDLPGHLLSYPIGVTADGSVTELPGMENFPDTRARVLGNKSDYLPPILTT

SEQ ID NO: 10966 - protein, 214 aa, Zea mays
GMRAFEAAKGAPAPRIGVPEYLERVHRYAALDPECYVVAYAYVDMAAHRRPAAAVASRNVHRLLLASLLVASKVLDDFHHSNAFFARVGGVSNAEMNKLEMELLDLLHFAVAVDHRVYHRYREHLETEMLRRDYHHGLMPVSGSAAPSKPRTTASSVVNNPPLPPPLTEGRRPAEAGDDGDDREEHEYRKVPNGLPAVNTMTTSSLRELWTFDY

SEQ ID NO: 10967 - protein, 240 aa, Brassica napus
VDPRVRAMPRLLPDVSDLTSFWNLFTVVPVLVTAFICHYNVHSIQNELDDPAQIRPVVRSALMLCSSVYIMTSIFGFLLFGDDTLDDVLANFDTDLGIPLGSVLNDAVRVSYALHLMLVFPIVFYPLRINIDGLLFPSARPLTTSNVRFGCLTAGLISVVFLGANFIPSIWDAFQFTGATAAVCLGFIFPASIILKDRHGRATSRDTTLAVFMIVLAVLSNAIAIYSDAYALFKKNAPRE

SEQ ID NO: 10968 - protein, 433 aa, Caldococcus noboribetus
MVSHPCTADEAKPPSEGQLARFENGKLIVPDNLIVAYFKGDGIGPEIVESAKKVLDAAVDKAYGGTRRIVWWEVTAGEEAQKECGSLLPDGTLQAFKLARVNLKGPLTTPVGGGFRSLNVTLRMVLDLYSNVRPVKWYGQPTPHCHPENIDWVIFRENTEDVYAGIEWPFDSPEAQKIRDFLKKEFGIELTPDTGIGIKPISKWRTQRHVRRAMEWAIRNGYKHVTIMHKGNIMKYTEGAFRQWAYDLILSEFRDYVVTEEEVNTKYGGKAPEGKIIVNDRIADNMLQQIITRPGEYNVIVTPNLNGDYISDEANPLVGGIGMAAGLDMGDGIAVAEPVHGSAPKYAGKNVINPTAEILSGMYLLSDFVGWPEVKLLVEYAVKQAIAHKQVTYDLAREMGGVTPISTTEYTDVLVDYIRHADLKPSRASEGLP

SEQ ID NO: 10969 - protein, 483 aa, Parachlamydia sp. UWE25
MMAAQLIPITVAEGDGIGPEIMDATLRILKAAGAPLDIKNVEIGEKVYLSGQPTGIENSTWDLIRQSKALLKAPITTPQGGGFKSLNVTIRTTLGLYANVRPCVAYYPFVETKYPGMNVVIVRENEEDLYTGIEYRQTPDVYEALKLITRPGCEKIIRYAFEYAQIYHRKKVTCFTKDNILKLTDGLFHKIFDEIGAEYPQIEKEHWIVDIGAAKLADTPTAFDVIVMPNLYGDILSDVAAQIAGSVGLAGSANIGNSGAMFEAIHGSAPRRAGQNLANPSGLLLAAIQMLVHLEQSNLAELIHNAWLKTLEEGIHTYDIFKEKTSKQKVGTKEFANAVTARLGKKPETLPAAHYSTSFHIKHSNFSSLKNFKQELYGIDIFIKWSEDVETLATLLQSTSNHDLKLKMINNRGVKVWPNKMPETACIDNWRCRFISSTNKIVSQEQILNLLNRLVQKKLTLTQTAYLFAFDGQAGYTLAQDEQ

SEQ ID NO: 10970 - protein, 460 aa, Emericella nidulans
MALPLRTARHASRLAQTIGRRGYATAEPDLKSALKAVIPAKRELLAEVKKQGDEVIGEVKVSNVIGGMRGLKSMLWEGSVLDADEGIRFHGKTIKDCQKELPKGPTGTEMLPEAMFWLLLTGEVPSTSQVRAFSKQLAEESHLPDHILDLAKSFPKHMHPMTQISIITAALNTESKFAKLYEKGINKADYWEPTFDDAISLLAKIPRVAALVFRPNEIDVVGRQKLDPAQDWSYNFAELLGKGGANNADFHDLLRLYLALHGDHEGGNVSAHATHLVGSALSDPFLSYSAGLLGLAGPLHGLAAQEVLRWILAMQEKIGTKFTDEDVRAYLWDTLKSGRVVPGYGHGVLRKPDPRFQALMDFAATRKDVLANPVFQLVKKNSEIAPGVLTEHGKTKNPHPNVDAASGVLFYHYGFQQPLYYTVTFGVSRALGPLVQLIWDRALGLPIERPKSINLLGLKK

SEQ ID NO: 10971 - protein, 213 aa, Zea mays
MGCFHSTAKRQHPGYEDPVHLASQTAFSVSEVEALFELFKSISGSVIDDGLINKEEFQLALFKNQRKENLFANRIFDLFDVKKRGVIDFGDFVRALNVFHPNIPMDEKVDFSFKLYDMDSTGFIERKEVKQMLIALLGESEMRLSDDIIETILDKTFSDADANQDGKIDRTEWENFVTRNPSLMKIMTLPYLKDITTTFPSFVFNSEVDDLVT

SEQ ID NO: 10972 - protein, 138 aa, Oryza sativa (japonica cultivar-group)
MVPAARSGWPAAAAVLVVVLVLSSPPGTSTVVVARAALSCSTVYNTLLPCLPYVQSGGAVPAACCGGIRSVVAAARTTADRRAACTCLKNVAAGAAGGPYISRAAGLPGRCGVSVPFKISPNVNCNAYVKTKNQINLY

SEQ ID NO: 10973 - protein, 85 aa, Glycine max
VNRAQARMYVICTGHKYMVGFPTRKTNNDITCIVSNGGRVQCMQVWPPFGKKKFETLSYLGDADDAQSLEELQFRFRNEGSLAWI

SEQ ID NO: 10974 - protein, 404 aa, Rickettsia sp. California 2
KIRGKIFRLPILKASIGEDVIDISRVSSEADCFTYDPGFMSTASCQSTITYIDGDKGILRHRGYDIKDLAEKSDFLEVAYLLIYGELPSIEQYNNFTKQVAHHSLVNERLHYLFQTFCSSSHPMAIMLAAVGSLSAFYPDLLNFKEADYELTAIRMIAKIPTIAAMSYKYSIGQPFIYPDNSLDFTENFLHMMFATPCTKYKVNPIIKNALNKIFILHADHEQNASTSTVRIAGSSGANPFACVSTGIASLWGPAHGGANEAVINMLKEIGSSENIPKYIAKAKDKNDPFRLMGFGHRVYKNYDPRAAVLKETCKEVLKELGQLENNPLLQIAIELEAIALKDEYFIERKLYPNVDFYSGIIYKAMGIPSQMFTVLFAIARTVGWMAQWKEMHEDPEQKISRPR

SEQ ID NO: 10975 - protein, 496 aa, Psychrobacter sp. 273-4
MSTAAKNTQANTYTDFHLQYIAGEWKKGDDDSINTNTNPFNGETLVEIQQATDKQLDEAYQAASDAQKQWAKQTPNERAAILYKVVSIFDQRQDEIVDWLIKESGSTRIKAMVEFSSARAITLEAASFPNRVHGEIRPSNTPGKENFIYREPMGVIAVISPWNFPLHLTQRSIAPALALGNAVVLKPASDTPITGGLLLAKIFEEAGLPKGLLNVVVGSGSEIGDAMVTHHVPSLVSFTGSTSVGKHIGELANGGEYIKQVALELGGNSPFVVLKDADIEQAVKAAAFGKFLHQGQICIAINRIIVEDEIYDDFVTRFVAHVKTLNVGDPNKADTAVGPIINKKQVASLKEKIVKAKDEGAKMLLSGEIKGQVVPPHVFSDVTREMDLSCNEVFGPLVGIIRAKDEDDALSIANDSMYGLSSAVFTQDMAKGLRFARGIKAGMTHINDISVNDESNAPFGGEKNSGIGRFNGEWILEEFTTLHWISMQHTPRDYPF

SEQ ID NO: 10976 - protein, 562 aa, Triticum aestivum
  unsure (1)..(562): unsure at all Xaa locations
DRATEEQLVTPWTVSVASGYNLLRDPRYNKGLAFTEKERETHYLRGLLPPAVTSQELQERKIMHNIRQYQLPLQRYMAMMDLQEGNERLFYKLLIDNVEELLPIVYTRTGGAGGRKYGSIFSRPQGLYISLKEKGKILEVLKNWPERSIQVIVVTDGERILGLGDLGCQGMGIPVGKLSLYTALGGVRPSACLPITLDVGTNNEELLNDEFYIGLRQRRAIGQEYADFLHEFMAAVKQNYGEKVLIQFEDFANHNAFDLLARYGTTHLVFNDDIQGTASVVLAGLVAALKLVGGTLAEHTYLFLGAGEAGTGIAELIALEMARQTKTPIDECRKKIWLVDSKGPRVRPRXGTRKESLQHFKKPWAHEHEHVGNLLDAVNAIKPTVLIGTSGKGQTFTQEVVEAISSFNEMPIILALSNPTSQAECTAEQAYTWSKGRAVFATGSPFDPVQYNGKTHVPGQANNAYIFPGFGLGVVMSGAIRVHDDMLLAASEALAQQVTQENFDKGLIYPPFSNIRKICAHIAANVAARAYELGLASRRPRPKDLVKYAESCMYSPIYRNYR

SEQ ID NO: 10977 - protein, 319 aa, Clostridium perfringens
MKKIAVLTSGGDAPGMNAALRAVTRMALHHGLEVMGVQRGYAGLINGELFKMDRKSVSEIINRGGTILRTARCLEFKQEEVREKAAQILKAYGVEALVVIGGDGSFMGAKLLSKLGVKTVGLPGTIDNDLSYTDYTIGFDTALNTVVDAINKLRDTSTSHERVSIVEVMGRNCGDLALYAGIAGGAEAIIVPEMPFDKDELIKTILEGRTNGKTHSIIVVAEGVGGSAELAKEIESVTGIETRATILGHIQRGGSPTADDIVLASRMGAKAVEVLLEGKTSKVIGIKENRIFDMDIDEALDIERSFDESLYEMANAINK

SEQ ID NO: 10978 - protein, 175 aa, Triticum aestivum
MAPTVMASSATSVAPFQGLKSTAGLPVSRRSNGASLGSVSNGGRIRCMQVWPIEGIKKFETLSYLPPLSTEALLKQVDYLIRSKWVPCLEFSKVGFIFREHNASPGYYDGRYWTMWKLPMFGCTDATQVINEVEEVKKEYPDAYVRIIGFDNMRQVQCVSFIAFKPPGCEESGKA

SEQ ID NO: 10979 - protein, 177 aa, Shewanella oneidensis MR-1
MMKFPLFILTSLMSTSVFAATCPSYLDVEVRKLHSEQSVNLCELTQGKPVLLINTASNCGYTSQFKALEALHKEYKDKGLVVIGFPSDDFFQEENDEKDTAKVCYINYGVTFTMLATSPVRGSDVNSVFKYLGDKAGAPKWNFYKYVVSGDGNTVMQFNSKVKPDSTELKQAIESVL

SEQ ID NO: 10980 - protein, 385 aa, Triticum aestivum
MEGGDARNGLTGTSQTTGSGVESPAKPLPPCCVKARAAAPESEAKCHATVVSGWFTETRSRCGKASKLQYYNNPMWPGETHSLKVDKILYQGKSPYQEVLIFESLTYGKVLVLDGIVQLTDKDECAYQEMITHLPLCSIPSPKKVLVIGGGDGGVLREIARHGSVESIDICEIDQLVIDVCKDFFPDLSVGFEDPRVRLHVGDAVEFLRNSPEGTYDAIIVDSSDPIGPAQELVEKPFFETIARALRPGGVLCNQAESMWLHTHLIQDMLSICCETFKGSVHYAWASVPTYPSGAIGFLLCAKEGRPVNFLAPINPIEKIEGAMTAGRDIRFYNTEMHRAAFVLPTFAKRELEAYSCSTIGAQQEEKSAEPAKVAVAPHSEILTA

SEQ ID NO: 10981 - protein, 465 aa, Yersinia pestis KIM
MKIVNHWIDGKNITSNDYFTTINPATGEVLADVASGGIKEINQAVAAAKSAFPHWANLPMKVRARLMRRLGELIEQQIPEIAQMETQDTGLPIYQTQNALIPRAAHNFEFFAEICQQMNGQTYPVDDQMLNYTLVQPVGVCALVSPWNVPFMTATWKVAPCLALGNTAILKMSELSPLTADKLGELALEAGIPAGVLNVVQGYGATVGDALVCHQDVRAISFTGGTATGNRIMQRAGLKKYSMELGGKSPVLIFDDADIERAMDAALFSIFSLNGERCTAGSRIFIQESLYSAFIQRFAERASRLRVGDPQDLDTQVGALISKPHWDKVSGYIQLGIEEGATLLAGGPDKPIDLPAHLRGGHFLRPTVLADVDNRMRVAQEEIFGPVACLIPFKNEDAGLRLARSIEAGMVFVNTQNVRDLRQPFGGIKASGTGREGGKYSFDVFAEVKNVCISMGEHPIPRWGM

SEQ ID NO: 10982 - protein, 145 aa, Arabidopsis thaliana
MGRGKIAIKRINNSTSRQVTFSKRRNGLLKKAKELAILCDAEVGVIIFSSTGRLYDFSSSSMKSVIERYSDAKGETSSENDPASEIQFWQKEAAILKRQLHNLQENHRQMMGEELSGLSVEALQNLENQLELSLRGVRMKKVLML

SEQ ID NO: 10983 - protein, 355 aa, Ustilago maydis 521
MPQYPSAAPGQKTFKLNTGAEIPVIGLGTWQSAPGEVAKAVESAIKAGYRHIVSMLTSLLTLTLGYVALHPLYIPFLAKDAAWIYGNENEVGQGIKASGVPRSELFVTTKIWCTYHRQPEACLDESLQRLGLDYVDLLLVHWPVPLVKRGDEKIPLNEDGSRAIDRDWSPEQTWELMEKLPATGKTKAIGVSNWSIAFLDKLLAKAKIVPAANQVELHPFLPQHELVKYCHDKGILPQAYSPLGSSGGPVLQDERVQSIAKAHKADPAQVVISWAAQRGVVALPKSVTPSRIETNGKLIVLSDEEMLELNELHKQEGKAVRLVKPNSDICSPPSETCLAPLNVADEALSYLRNSD

SEQ ID NO: 10984 - protein, 112 aa, Bartonella sp. Rf1563yn
ANEACLKMLQEIGSIKRIPEFIARAKDKNDPFRLMGFGHRVYKNYDPRAKIMQKTCHEVLKELNIQDDPLLDIAIELEKIALSDEYFIEKKLYPNVDFYSGITLKALGFPTE

SEQ ID NO: 10985 - protein, 202 aa, Methanopyrus kandleri AV19
MIALATGPRYRVPFRRRREGKTNYYKRRELIKADAPRLVARKTLNHNIAQIVDFAPHGDVTLASAHSIELRNKFGWKGHCGNTPAAYLTGYLCGLRALERGIERAVIDIGLHRPVRGSRVFAMLKGALDAGMDIPHGEEVLPPEDRIRGEHIANLARQIKEEDPEEYERRFSKYLERGLKPEELPEHFEEVKSKIEEEFGGA

SEQ ID NO: 10986 - protein, 382 aa, Ustilago maydis 521
MAPVANTKSSVELSALKDNLILMATHKKELELIKSTPAAPGPGMALVHVRATGVCGSDVHFWKHAGLGPWKIESQCALGHESGGIVIAVGEGVDNVVPGDRVAIEPGVPCFKATCDFCRTGKYNLCPTVDFYSVPPKDGTLKRYHEHPAGWLHKVPDNMSYEEIALLEPLSVTLQATLQAEISLGTPVLITGAGPIGIVQLLCASAAGATPIVITDVVKDRLDFAQKIVPGTFTYQIDPKKSPLESATEICKVFSKASGKHIAQGERDVQPAITMECTGIESSIQTASYATAASGLVFVIGVGANLQQIPFMHLSTNEITLKFLFRYRDTWPRAIRLVSSGKIDVKQIVTSRFPLEKAKEAVEHAADRSKFSVKTIIYDDQE

SEQ ID NO: 10987 - protein, 95 aa, Glycine max
  unsure (1)..(95): unsure at all Xaa locations
MEMFSSMISFPAVATVNRAGAGMVAPFTGLKSMAGFRTRKTYYVITSIASVGVRVQCMHVWPLIGWKTFATFHYLPDLDDALFAXVVAFLVRKGW

SEQ ID NO: 10988 - protein, 207 aa, GIBBERELLA ZEAE PH-1
MATNITWHPSLSRKEREETRGQRGLTIWLTGLSASGKSTVATALEQHLLHLGVAAYRLDGDNVRFGLNKDLGFSEVDRNENIRRISEVAKLFADSSTIAITSFISPYRADRQVARQLHEQATQGGDAPIPFVEVYVDVPLEVAEQRDPKGLYKKARAGEIKDFTGISAPYEEPEKAEITIKTHENSVEECVAQIVEWLNEKGYLNKK

SEQ ID NO: 10989 - protein, 165 aa, Glycine max
  unsure (1)..(165): unsure at all Xaa locations
MAIVYVLLVALITAASHAPHGAHGQTWHGDLAALAAAGKLRSDPNATLAASTDFGNITAALPGGVLFPSSPADVAALLRAXNTTVAWAXTISFRGRGQSVMGAGLALGGGGPHMPSLGGPGLRGGIQRGRGTAKNPPPGGNKRGDQPPGVKLWNAGGGPASRGTE

SEQ ID NO: 10990 - protein, 115 aa, Glycine max
  unsure (1)..(115): unsure at all Xaa locations
QVNGEIYNHEELRKQLPNHKFRTGCDCDVIAHLYEEHGEDFVDMLDGIFSFVLLDTRDNSFIVARDAIGVTSLYIGWGLDGSVWISSXMKGLNDDCEHFXVFPPGHLYSSKERGF

SEQ ID NO: 10991 - protein, 318 aa, Pseudomonas putida
MSLNPDLAAYLQLVEAGRSAGKVLPMHALEADEARRQFEESSALIAGKADEPDCISDLSLTTRDGHTLPVRLYRPPQDDPALAGAALLYLHGGGYVVGSLDSHDTLCWNLAQDAGVPVIAVGYRLAPQWRFPTASDDALDAWRWLVEQAEALGIDAQRLAVVGDSVGGSLATILANQLAAQRELAAPRLQVMIYPVTDASCRRPSVQRYGSGYLLEAQTLEWFYQQYATVPADRLDPRFSPLLGSVASNSAPALMLIAECDPLHDQGVAYARHLEQAGVAVQLAVIPGVTHDFMRMGSIIEEADEGLVMVVEALQQHL

SEQ ID NO: 10992 - protein, 442 aa, Brucella suis 1330
MLTKTNAPSLDNFWMPFTANRQFKAAPRLLASASGMYYTDVDGNQVLDGTAGLWCCNAGHGRKRITEAVERQISTMDFAPIFQMGHNVAFDFAEKLAAIAPGGAEAKLDRVFFTNSGSESVDTALKIAIAYQRAIGQGTRTMVLGREKGYHGVGFGGISVGGLVNNRRVFPQIPADHLRHTLDIEKNAFSKGLPANGIELANDLERLVQLHGAEKIAAVIVEPMSGSAGVILPPKGYLERIRATADKYGILLIFDEVITGFGRLGTPFAVDYFGVVPDLVTTAKGLTNGAIPMGAVFAARKVYDGLMTGPENAIELFHGYTYSGHPVASAAGLATLEIYAEEGLLTRGAGLADYWQEALHSLKGAPNVIDIRNLGLVGAVELASRKDAPGARAYDIFVECFKKGLLIRVTGDVIALSPPLIIEKEQIDTIISVLGDAIKRAA

SEQ ID NO: 10993 - protein, 442 aa, Bradyrhizobium japonicum USDA 110
MLDETAGRAPGGAARWWLAQSLRALGAEIAARGGSLILRKGPAAGVIPEEARESGARAVYWNGIAQAPHQAIERRLEAALAKLGVDSQSFPGDLLVPPSAIRNKEGRGLRVFTPFWRRVLSLGDPPKPLPAPKQLRPGPKIVSDRLESWQLAPTKPDWAGGLRERWTPGEASARARLRDFLKTIARGYAGDRDRPDRVGTSGLSPHLRFGELSPRQVWHAARFAAAEDAALGPGIEKFLSELGWREFCRHLLHDHPDLATENLQTNFDGFPWQSDGKVLAAWQRGRTGYPIVDAGLRELWHTGVMHNRVRMVVASFLVKHLLIDWRDGEAWFWDTLVDADAGSNPANWQWVAGCGADAAPYFRVFNPQLQGEKFDPDGTYVRRWVPELQGLPAKLIHQPWQATPNELASAGVTLGKTYPQPIVDHARGRERALSAYAKIRKG

SEQ ID NO: 10994 - protein, 134 aa, Zea mays
PSIPYDPMALRKAFDKPVSLVTAVAVRHLAGTEAARRLGTKLHSFYVGLKGSPDLKAAREDDIDAIEDVIYHTEAYDVTTIRASTPMFLMSHKIKSLGVKMVISGEGSDELFGGYLYFHKAPNKEELHRETCRK

SEQ ID NO: 10995 - protein, 175 aa, Triticum aestivum
MAPAVMASSATTVAPFQGLKSTAGLPVSCRSGSTGLSSVSNGGRIRCMQVWPIEGIKKFETLSYLPPLSTEALLKQVDYLIRSKWVPCLEFSKVGFVFREHNSSPGYYDGRYWTMWKLPMFGCTDATQVLNEVEEVKKEYPDAYVRVIGFDNMRQVQCVSFIAFRPPGCEESGKA

SEQ ID NO: 10996 - protein, 349 aa, Zea mays
MGERGAEEDGSGGSSLSLMCLEDGADLDAGGSAESADDGEPAVVAHSDAGEDQEEEYMDYLVSKESSFCCSPSSSPVSSDAGAETRPSSTASSSDEWFRCARHATVAWVLETRAYFGFSHRAAYLAVSYMDRFCLRRCMDVSVMPWAARLLAVACLSLAAKMEEYRAPALSEFRAHDDYDFSSVCIRRVELLVLSTLGWRMGGVTPLDYLPCLSFRLRRGGGGGLIAAKAAALIFSAAEAASVLDYRPSTVAVAAVLAAAHGAMTKEALECNMSSLTPSCLLDKDDVHACYSTMLSESSSPTPSKLADKRPPPSSSGSTMYESVDAASSFAATAGRSKRARLEMPAIGP

SEQ ID NO: 10997 - protein, 277 aa, Bacillus sp. KSM-K16
MIPTVTLKDGLQLPAIGFGTYALNGAAGVNAMVSAIDIGYRLLDSAFNYENEGAVGEAIRRSSVPRAQLRVTSKLPGRRQAYAQAIVTIQESLLRARLDYYDLYLIHWPNPKTDLYVEAWQALIDAQKWGLIRSIGVCNFLPEHLERLERETGVMPSINQIELHPYFSQESQRVWDNNHHIVTESWSPLGRASSVLQDKVIKQIAATHRKSVSQIILRWHVQLGAIPLPKSASPERQLENIAIFDFSLSTEEMEQINKLTKADGRIQNQDPAEYEEF

SEQ ID NO: 10998 - protein, 347 aa, Oryza sativa (japonica cultivar-group)
MAARWRGIPWCRSLPNGPSSPVDMVVDYYLYDYEYAEPPRVTSLQNAVPQRTFSDFGDDVYFVADKRGYESVVHYLAGQYLNTDDSGNVADPRLQLNKVVREISYSSSGVTVKTEDGSVYQADYRHGLCQLGSPAERSYTVQATAASSDRCVLHVFDQKWKILAIYEFDMAVYTKIFVKFPKRFWPEGEGREFFLYASTRRGYYGIWQEFEKQYPDSNVLLVTVTDKESRRIEQQSDNQTKAEIMEVLRNMFPDQDVPDATDILVPRWWSNRFYKGTFSNWPIGVNRYEYDQLRAPIERVYFTGEHTSEYYNGYVHGGYLAGIDSAEILIDCAQNQMCKYHVQGKYD

SEQ ID NO: 10999 - protein, 467 aa, Agrobacterium tumefaciens str. C58
MTIDIKNIAEMDRNAVLHPFTQLKDFASGKLGEPTIVETGKGIRIQDAHGKQLIDGFAGLYCVNVGYGRTEVAEAISRQAYRLAYYHSYAAHTTDELAILSDRLVRMAPGKMSKVFYGMSGSDANETQAKLVWYYNNLRGKPQKKKIISRERGYHGCSVVAGSMTGMSFYHDHMDLPRVGILHTGVPHHYWGAEAGETELEFSKRRAAELEALILREGPDTIGAFIAEPVLGTGGITPPPEGYWPAIQEVLKKYDVLLIADEVITGFGRTGSMFGSQHYGIEPDLITVAKGLTSAYFPLSGAIVGEKVYTVMEDGADRVGAFSHGYTYSGHPIGAAAANAVLDIVEKEDLPGNAQAVGSYFQEQLKAKFAQLPIVGEVRGVGLMGAIEFVADREKKTRFAPHLTVGARVSKAARNGGLIARAMPHGDILGFAPPLVTTKAEVDEIIAIAEAAVRTVMDDLVQAGEKI

SEQ ID NO: 11000 - protein, 397 aa, Lycopersicon esculentum
MSSSLHSPLYSSLSSSSALQDRKLRNAVNFAKPNLIFKPRRSFPLIRASAGFSSSLDTGLSTELDAVANHSEIVPDTVIFDDFEKFPPTAGTASSSLLLGICGLPDTKFKSAVDRALSDSECYGLESSDLQMSCFFNKALAHVGGDLAKLVPGRVSTEVDARLAYDTHGIVRKVHDLLKAYTEIEVPPERLLFKIPATWQGIEASRVLEAEGIQTHLTFVYSFCQAAAAAQAGASVIQIFVGRLRDWSRNHTGDSEVESALRRGEDPGLALVTKTYNYIHKYGHKTKLMAAAVRNKPDVFNLLGGGYIITPLKVLQSLKESVTLLDEKYSFTRRLSPQSAAAFNFTQDELQKWDQYSFSSAMGPASVELLTIGLDGYINQAKRVEELFGKIWPPPNV

SEQ ID NO: 11001 - protein, 492 aa, Agrobacterium tumefaciens str. C58
MKGIASAALKNLHRRDLIEDRAFVNGAWVERDQMFAIVDPAGGDHLADVASCTLNDVDFAIDAASKAFAGWRDMLPVDRGDILRNWSARMRENAHDLATIISAEQGKPLAESRGEIAYAANFLDWFASEGERSYGETIPTHLKGSNLSVRMQPIGVTVAITPWNFPSAMIARKAGAALAAGCTMIVKPAPETPLSALALARLAEESGVPPGVLQVLPGEAAPLARRLLENTEVRAFSFTGSTEVGRILLTQSAATVKKASLELGGHAPFIVFADADLTEAVKGCLGAKFATSGQDCLAANRIYVQRSLYPRFVERFAEATSRLTVGHGLETGVDIGPMTRPSVAEKCRQQVAQALSAGARLVCGGQDSPLGGNFVTPTVLADVTDDMLIAREETFGPVAAILPFDDEAEVIRRANATEMGLAAYLYTNDLGRAMRLTDQLEYGMVAVNTPKFTGAPIPFGGWKQSGLGREGSRHGLMEYLEPKYVCFGNLAA

SEQ ID NO: 11002 - protein, 422 aa, Wolinella succinogenes
MGTVTFTNNETGEKFEFEILNPTRGPQLVDFSKFYETTGMFTFDPGYGSTANCKSEISFVDGKKGELVYYGHPIEELVEKYKFVDVIKLLIGNGYIFPTKEESDQFERELVRRSYIHEGLRKIIDAFPDGAHPMANLSSSVSALSTFYYDHIDMEYEAEYQTMARRIIAKTPTLAAFAYRSSVGSPFVYPDADRGYVENFLYMLRAYPHGKLKEEISPIEVSALDTIFMLHADHGQNASTATVRNVASTGVHPYAALSAGLSALWGKAHGGANESVMDQLEMIGDVKNVDRYIAKAKDKNDSFRLMGFGHRVYKSYDPRARILRKLKDDLDQKGVKMNQRLVEIAEKIEEVATQDEYFLSRSLYPNVDFYSGIILTALKIPKSMFTPIFAIGRMPGWCGQVLELLQEPNVKITRPRQMYVGK

SEQ ID NO: 11003 - protein, 121 aa, Solanum melongena
SSKDSKQLDAEVHRKYIYGGHVAAYMNILMEDEPEKYQSHFSSYIKADLAPDNIEEMYKKVHAAIRPDPSPKKSQKQPPKTHKRYNLKKLTYEERKAKLIERLNALNAAGGNDDDDEEDDE

SEQ ID NO: 11004 - protein, 168 aa, Zea mays
SILQIKVEDMDAYAPKDLLVVTTGSQGEPRAALNLASYGGSHTLKLSKEDVLLYSAKVIPGNETRVMKMMNRLTDLGPKIIMGKDSGLHTSGHAYREELEEVLRIVKPQHFLPVHGELLFLKEHESLGRSTGIRHTTVIKNGEMLGVSHLRNRRVLSNGFVSLGKEDL

SEQ ID NO: 11005 - protein, 430 aa, Wolinella succinogenes
MANFEGYNPRFLPLPTEGEAITLTPEGILQVPDHPIIPYIEGDGIGMDITPAMKSVVDAAVNKAYGGKRKIAWYEVYTGEKCYEKFKNEKSLSPMDQWLLPDTIDAINYFKVSIKGPLTTPVGEGFRSLNVALRQMMDLYVCLRPVRWYGSPSPVKEPHKVDMVIYRENSEDIYAGIEFAAESKEANKVIQFLQNEMEVKKIRFPKTSAIGIKPVSKEGSERLIRKAIQYAIDNDRASLTFVHKGNIMKFTEGGFMKWGYELLKREFGATEIDGGPWCSMKNPKTGKEIIIKDVIADAFLQQILLRPAEYDVIATMNLNGDYISDALAAMVGGIGIAPGANLNDSVAMFEATHGTAPKYAGLDKVNPGSLILSAEMMLRHMGWIEAADLVVSSMKKAIESKNVTYDFARLMEGAKEVKCSEFAQVMIERM

SEQ ID NO: 11006 - protein, 197 aa, Medicago sativa
MSGSRFIKCVTVGDGAVGKTCLLISYTSNTFPTDYVPTVFDNFSANVVVDGSTINLGLWDTAGQEDYNRLRPLSYRGADVFLLAFSLISKASYENIAKKWIPELRHYAPGVPIILVGTKLDLRDDSQFFQDHPGAAPITTAQGEELRKLIGAPVYIECSSKTQKNVKAVFDSAIKVVLQPPKQKKTKRKGQKACSIM

SEQ ID NO: 11007 - protein, 179 aa, Wolinella succinogenes
MALEGESPQGWVIWITGLAGSGKTTLGRAVYEALRREISHVVYLDGDGFREIFGHSGYDRESRIEISKKRSALCAFLASQGIHVVATAISMFDEIYRLNRQNIPRYLEVYVKCEMEELIRRDQKNLYTKALKGEIQEVVGVDIAFDEPSAHVVIDNTLWGSIDEKRDRILSEIYIQGIR

SEQ ID NO: 11008 - protein, 312 aa, Zea mays
  unsure (1)..(312): unsure at all Xaa locations
IFEPKAGVQRTCVHRAERSAGPVRRPPADATTNGCPPSGPGGAAGGAEAGAFGGAILLLWAWRVGSRRRGLRRPALRQRRGPLPSLPPPTPPRRGPISPALLLHNSAVSLLHSSLTSVSVIFVLAKQWRNKGLEYVFEQEELFGCIWLGTFXSSXHACGYFAYDQLDMLRYRLYSGWLPGILMHHLILLICFTLALYRNVTINYLNLSLVCELHSIFLHVRKVRRMVGFRDFDRTVVKLEWVLNWTTFVTARVICHILITYKLISDAHKFGKGIELPLALLGMAGMNLLNIFLGLDLLKAFTRERNKQNHQD

SEQ ID NO: 11009 - protein, 368 aa, Sordaria macrospora
MATHNIVVFGGDHCGPEVVVEAIKVLKSIETNSPSAGKFNLQNHLLGGASIDKHHDPLTDEALNAAKAADAVLLGAIGGPEWGTSSTVRPEQGLLKLRKELGTYGNLRPCNFASESLVDSSPLKAEVCRGTDFIVVRELTGGIYFGDRTEDDGSGYACDTEPYSRAEIERIARLAGFLALAKNPPAKVWSLDKANVLATSRLWRKTVTDVISKEFPQLQLEHQLIDSAAMLLVKNPRALNGVVITSNLFGDIISDEASVIPGSIGLLPSASLGGIPDGKGKCNGIYEPIHGSAPDISGKGIVNPVGTILSVAMMLRYSLNLPKEADAVEAAVKAAIDNGTKTKDLGGSATTSDMGNAVVAELEKILKA

SEQ ID NO: 11010 - protein, 115 aa, Leonurus artemisia
MAALIKLMCTMLIVAAVVAPLAEAAIGCNTVASKMAPCLPYVTGKGPLGGCCGGVKGLIDAARTTPDRQAVCNCLKTLAKSYSGINLGNAAGLPGKCGVSIPYQISPNTDCSKVH

SEQ ID NO: 11011 - protein, 251 aa, Triticum aestivum
MMGYQKGVDIEAGTSGGTGTAAPTRGLYPGMTESPELRWALIRKIYVILSLQLLLTAVVAAVVVKVRAIPHFFVSSSAGLGLYIFLIIFPFIVLCPLYFYRQKHPVNLLLLGVFTVAISFAVGMTCAFTSGKVILEAAILTTVVVFSLTAYTFWAAKRGQDFSFLGPFLFASLIMLLVFGFIQILFPMGKLSHMIYGALAALIFSGYIVYDTDNIIKRYTYDEYVWAAVSLYLDVINLFLALLTLFRAGDS

SEQ ID NO: 11012 - protein, 279 aa, Bacillus cereus ATCC 10987
MKNLQSTTTLHNGVEMPWFGLGVFKVEDGPELVEAVKSAIKAGYRSIDTAAIYGNEKAVGEGIRAGIKEAGISREDLFITSKVWNSDQGYETTLAAYEESLKKLELDYLDLYLVHWPVEGKYKDTWRALETLYKEERVRAIGVSNFQIHHLQDVMKDAEIKPMINQVEYHPRLTQKELQAFCKEQGIQMEAWSPLMQGQLLDNETLQAIAEKHGKTTAQVILRWDLQNGVITIPKSTKEYRIIANADVFNFELTKEDMEKIDALNQNHRVGPDPDNFDF

SEQ ID NO: 11013 - protein, 311 aa, Picrophilus torridus DSM 9790
MDRNELLKEPVKDISIKSETTISELIGMFGRSGGFTAKKIYEGYEIIKEMFNDDETTFLSFPADIISTGTRGIINELVKRKLVDVIITTNGTLDHDIARTYRDYYAGTFNFSDAMLRDLGINRLGNVFVPDESYGSIIEEKVMPILDELYKEKKEWSGYELIWELGKRINNESSIIYNAYKNRIPVFIPGMTDGSVGSQLWSFYEMNRDFRINLLEDEHKLSDIIFDAKKTGAIMIGGGISKHHTIWWNQFRDGLNQAVYITTAQEYDGSLSGAKLEEAISWKKVREDARFVNIYGDATVILPLIVAPFLK

SEQ ID NO: 11014 - protein, 131 aa, Zea mays
  unsure (1)..(131): unsure at all Xaa locations
ALVFSCRSRNELRGCITRLTDPWSPSYTLCRYQGVVPIKVNQNKHFLHDKVRGVQQWNYGLEAGSKPELLIAMSCLPSTEAXPKPNLICNGYKDARLHGDCALXRAMGLNLIIVLEMEEELAICLDQYRKL

SEQ ID NO: 11015 - protein, 341 aa, Streptomyces avermitilis MA-4680
MRIGVLTSGGDCPGLNAVIRSVVHRAVVDHGDEVIGFRDGWKGLLECDYLKLDLDAVSGILARGGTILGSSRVQPAHLRDGVERARGHVAELGLDAIIPIGGEGTLKAARLLSDAGLPIVGVPKTIDNDIAVTDVTFGFDTAVGVATEALDRLKTTAESHQRVLIVEVMGRHTGWIALHSGMAAGAHAIVVPERPFDIEELAAKVGERFEAGKRFAIVVAAEGAKPRAGSMDFDEGKKDVYGHERFAGIARQLSLELEERLGKEARPVILGHVQRGGTPTAYDRVLATRFGWHAVEAVHRGEFGKMTALRGTDIVMVSLAEAVETLKTVPEERYAEAECVL

SEQ ID NO: 11016 - protein, 472 aa, Zea mays
  unsure (1)..(472): unsure at all Xaa locations
GVVYIAXWSRDTXVVLVRDPGGASASSESLGELLIRKADEGVAVLMLVWDDRTSVGLGPIKRDGLMATHDQDTASFFRDTRVQCVLCPRNPDKDRSYVQDIETATMFTHHQKTVIVDGGGAPAPETPPGLVSFLGGIDLCDGRYDTQDHPLFRTLGTTHSKDFHQPNFPGASISKGGPREPWHDIHCRVEGPAAWDVLENFEQRWKKQGKGDNLLVALNKAWAEREAAPRGDAESWNVQVFRSIDGGAAAGFPEGSANAPREAAALGLVSGKDHVIERSIQDAYIHAIRRARDFIYIENQYFLGSSYAWRQNDGVTVEDINALHLIPKELSLKIVSKIEAGERFVVYVVVPLWPEGVPESGSVQAILDWQRRTMEMMYKDVTLAIRARGLRADPRDYLTFFCLGNREAPSPGEYVPPEHPDPNTDYERAQQARRFMIYVHAKTMIVDDEYIIVGSANINQRSMDGGRRLVDI

SEQ ID NO: 11017 - protein, 90 aa, Glycine max
ITELAGCDRLTISPALLEELTKSTDKLAKKLDPETAAKAYSGEKLSYDEKDFRLSMNEDAMATDLLAEGIRGFSADIVKLEQILKAKLSA

SEQ ID NO: 11018 - protein, 482 aa, Escherichia coli CFT073
MKLNDSNLFRQQALINGEWLDANNGEVIDVTNPANGDKLGSVPKMGADETRAAIDAANRALPVWRALTAKERANILRNWFNLMMEHQDDLARLMTLEQGKPLAEAKGEISYAASFIEWFAEEGKRIYGDTIPGHQADKRLIVIKQPIGVTAAITPWNFPAAMITRKAGPALAAGCTMVLKPASQTPFSALALAELAIRAGVPAGVFNVVTGSAGAVGNELTSNPLVRKLSFTGSTEIGRQLMEQCAKDIKKVSLELGGNAPFIVFDDADLDKAVEGALASKFRNAGQTCVCANRLYVQNGVYDRFAEKLQQAVSKLHIGNGLEKGVTIGPLIDEKAVAKVEEHIADALEKGARVVCGGKAHERGGNFFQPTILVDVPANAKVSKEETFGPLAPLFRFKDEADVIAQANDTEFGLAAYFYARDLSRVFRVGEALEYGIIGINTGIISNEVAPFGGIKASGLGREGSKYGIEDYLEIKYMCIGL

SEQ ID NO: 11019 - protein, 505 aa, Bradyrhizobium japonicum USDA 110
MNKVEFLSVTKVPFAERYDNFIGGKFVAPISGKYFDNASPVNGQIVCKIARSDAQDVEAALDAAHAAKAGWGSTSVAERAAILNKIADRMEENLERLAIAETWDNGKPIRETRAADIPLAIDHFRYFAGVVRAQEGSIGEIDHDTIAYHFHEPLGVVGQIIPWNFPLLMACWKLAPALAAGNCVVLKPAEQTPASIMVWAEIIGDLLPPGVLNIVNGFGLEAGKPLASSPRIAKIAFTGETSTGRLIMQYASQNLIPVTLELGGKSPNIFFKDVTAEDDDFFDKAIEGFVMFALNQGEVCTCPSRALVHADIYDRFMERALKRVAAIKQGDPRAADTMIGAQASGEQLAKILSYIDIGKQEGAKVLAGGGRAELGGDLSGGFYVQPTVFEGHNKMRIFQEEIFGPVVSVTTFKTDDEALAIANDTLYGLGAGVWSRDANRCYRFGRAIQAGRVWTNCYHAYPAHAAFGGYKQSGVGRETHKMMLDHYQQTKNLLVSYSPKKLGFF

SEQ ID NO: 11020 - protein, 367 aa, Methanopyrus kandleri AV19
MPPKWYRHVMRVLSESHVVLEVRDVRYPEETRWEKLPRLEDVFDFTRVVVLNKADLVPRAETERVKEEVELEEDVPAVYVSARERMGFRHLRRTIYEVAPEDVETVRVGVVGFQNVGKSTIINALTRRSAAETSRRAGYTRGKQWVRGGRKLLVIDSPGVIPTDEAAAEAVALDPDVLEDPVEPALGVIERVVREYPGALSDKFGIDESMDPERILRDISERLGKDLRTTAKLLLREWVDGSLVEIYRTTRADLAETSELEVGGTAQRLVEETLREIEEVVPEGIPPSAATVRGILTRLAHGENVDGVGFGTIRLGEYGVGVSVGDRYYDRMVRRLRRELGGEVISEERFRVGANGRKAVALVTKGR

SEQ ID NO: 11021 - protein, 139 aa, Triticum aestivum
  unsure (1)..(139): unsure at all Xaa locations
ADPSIPSLPLSLDHPCPRTEDRRRPTPSTSETKXXSGASXXXPXQGGXIRKXGHXVIMXRPCKVVEXSTSXTAKHGHAKCHFVXAIDIFNXKNXEDXXPSSXNXXXPHXDRQXYQXLIDISDDGYXHLLTESGNTKDDL

SEQ ID NO: 11022 - protein, 491 aa, Burkholderia cepacia R1808
MADWQDKAASLRIEGRAFIDGASRDAHGGKTFDCVSPIDGRVLAKVADCGEADVNAAVAAARRAFDAGVWAGLNPRARKAVLLRWAALMRTHLDELALLETLDAGKPIGDTTTVDVPGAAYCVEWFAEAIDKVGGEVAPADHHLVGLVTREPVGVVAAVVPWNFPILMAAWKFGPALAAGNSVVLKPSEKSPLTAIRVAQLAYEAGIPAGVFNVVPGAGEPGKLLALHRDVDCIAFTGSTAVGKLIMQYAAQSNLKRAWLELGGKSPNIVLPDCPDLERAAQAAAGAIFYNMGEMCTAGSRLLVHRDIKDAFIAKLVAAARAYVPGNPLDPSVSMGAIVDGIQLERVLGYIEAGRSEGTLVTGGARVRQETGGFYVEPTVFEVKPDAKIAREEIFGPVLSVIVFDDVDEAVRIANDTEYGLAAAVWTSDLTTAHDVSRRLRAGTVWVNCYDEGGDMNFPFGGYKQSGNGRDKSLHALEKYTELKSTLIRLR

SEQ ID NO: 11023 - protein, 102 aa, Triticum aestivum
RFKCFPPIRDAANKENLWEALLDGHIDMLSSDHSPSTPDLKLMEEGNFMKAWGGISSLQFVLPVTWSHGKKYGITLNQLASWWSEKPAELAGQKNKGSILPG

SEQ ID NO: 11024 - protein, 343 aa, Listeria innocua Clip11262
MKAVVKTNPGYDQMELRDVEEPQVYGDKVKIKVAFTGICGSDIHTFKGEYKNPTTPVTLGHEFSGVVVEVGPDVTSIKVGDRVTSETTFETCGECIYCKERDYNLCSNRRGIGTQANGSFAEFVLSREESCHVLDERISLEAAALTEPLACCVHSALEKTTICPDDTVLVFGPGPIGLLLAQVVKAQGATVIMAGITKDSDRLRLAKELGMDRIVDTLKEDLAEVVLGMTDGYGAERVFDCSGAVPAVNQGLPLTKKKGDFIQVGLFAEKKNAIDEESIIQREIAYIGSRSQKPSSWILALDLLANGKINTDKMITKVYGLDDWREAFEAVMAGNEIKVLVKS

SEQ ID NO: 11025 - protein, 350 aa, Listeria innocua Clip11262
MRAAVLYENNVIKAEQIDEATCGKDQVRVEVKAVGICGSDIHKMQTRWKYPLPAVMGHEFAGVVTEIGSEVTNVAIGDRVAGIPLEPCMECNYCKAGDFALCDNYRMVGSHFHGGFAENVVMKADNVISIGDLDFEEGAMIEPLAVSMHGVLGIEPRLGDTVIVFGIGTIGILVVQCLLLAGVKDIIAVDISDKKLADAREFGCKYTINPKNEDLKERVFAYTNGLGADIALECAGSKITQEQCLLVTKKKGKVGYLGIAYADVLLHEEAFENIFRRELTLKGFWNSYSAPFPGEEWRTSIEFVKQGRIKLKPLISHRYKLEETKEAFDMILSREHDYNKVMILPQKGDD

SEQ ID NO: 11026 - protein, 154 aa, Synechocystis sp. PCC 6803
MPLPTSLTTLDGTPLAPEVIADKVVLFVNVASKCGLTPQYSGLVALDKAYGEKGLVIIGVPCNQFGAQEPGSPEEIKDFTKTKYDVDFTLLEKQDVNGPNRSPLYQFLVGDGEDISWNFGKFLIGRDGQVVARFDPQTKPDDTNLKAAIEKALG

SEQ ID NO: 11027 - protein, 477 aa, Burkholderia cepacia R1808
MTYRNESAWVQPAAPATAPRTTQARTTAEYRALDAAHHIHPFSDMGALNRAGSRVIVKADGVYLWDSDGNKIIDGMAGLWCVNVGYGRKELADAAYRQLQELPFYNTFFKTTHPPVIELSAMLAEVTPAGFNHFFYCNSGSEGNDTVLRLVYQYWRVQGKPQKKYVISRHNGYHGSTIAGATLGGMDYMHEQMPSKVEHIVHIDQPYFFGEAQAGETPEAFGLARAQQLEAKILELGAENVAAFIGEPFQGAGGVIFPPSTYWPEIQRICRKYDILLVADEVIGGFGRTGEWFAHQHFGFEPDLITMAKGLTSGYVPMGAVGIHERVARPIIDNGEFNHGLTYSGHPVAAAVAVANLKLLRDEGIVERVKRDTGPYFQALMRDTFAQHPIVGEVHGQGMVASLQLAQAPAERRRFANGGEVGTICRDFCFNGNLVMRATGDRMLLSPPLVISRQEIDELVSKAKKAVDATAQQLGLS

SEQ ID NO: 11028 - protein, 334 aa, Glycine max
MGEIALPNGISNGNINGVNGQSHSLNGYRKSCWYEEEIEEDLRWCFALNSILHTGASQYQDIALLDTKPFGKALVIDGKLQSAETDEFIYHECLVHPALLHNPSPKNVFIMGGGEGSTARELLRHKTIDKVVMCDIDEEVVNFCKSYFVVNKEAFRDTRLEVVINDARVELEARDESYDVIIGDLADPIDGGPCYKLYTKSFYELIVKPRLKQGGIFVTQAGPAGIFSHTEVFSCIYNTLRQVFKYVVPYSAHIPSYADIWGWVMASDSPLDLSAEELDLRMRHRIKGENGYLDGKTFTSASTLSKTVRNSLDNETHVYTEESARFIYGHGKHA

SEQ ID NO: 11029 - protein, 348 aa, Mesorhizobium loti MAFF303099
MRALVLEKKGELSLREIALPLDVGPDDVKIAIHTVGVCGSDVHYYTHGAIGSYVVRAPMVLGHEAAGTVVETGANVETFKAGDRVCMEPGVPNLSSRATKLGIYNVDPDVSFWATPPVHGVLAPYAVHPAAFTYKLPDNVSFAEGAMVEPFAIGMQAASRARIVPGDVAVVVGCGPIGIMIALAALAGGCSKVLISDFSAPKLKIAAQYAGIVPVNIGERSLVDAVAAATDKWGADIVFEASGSPKAFADLFDVVRPGGAVVLVGLPVEPVALNVPAAISKEVRIETVFRYANIFDRALQLIASGKVDLKPLITGTYDFADSIKAFERAAQGNPEDVKLQILLTGEKG

SEQ ID NO: 11030 - protein, 280 aa, Oceanobacillus iheyensis HTE831
MVNQIPNVTLHDGLTIPKVGFGTYRLNGNDGVQAINNAIDHGYRLIDTAYNYENEGTVGEAVRRSSTPREQLLITSKLPGRYHHYDKAVTTIQESLYRANLDYYDLYLIHWPNPIQDIYVEAWQALIEAKRRGYIRSIGVCNFLPEHLERLKQETGELPTINQIELHPFFNQEDQRKWHQEHQIATESWSPLARTNDVLDHPVLQKLASNHNRTVSQIILRWHYQLDAIAIPKSATPSRQLENISIFDFELSDEEMSIINQLSKVDGRMKDQDPAVYEEF

SEQ ID NO: 11031 - protein, 413 aa, Rickettsia heilongjiangii
IAELKIRGKIFKLPILKASIGEDVIDISRVSAEADCFTYDPGFMSTASCQSTITYIDGDKGILRHRGYDIKDLAEKSDFLEVAYLLIYGELPSGEQYNNFTKQVAHHSLVNERLHYLFQTFCSSSHPMAIMLAAVGSLSAFYPDLLNFKEADYELTAIRMIAKIPTIAAMSYKYSIGQPFIYPDNSLDFTENFLHMMFATPYTKYTVNPIIKNALNKIFILHADHEQNASTSTVRIAGSSGANPFACISTGIASLWGPAHGGANEAVINMLKEIGSSEYIPKYIAKAKDKNDPFRLMGFGHRVYKNYDPRAAVLKETCKEVLKELGQLDNNPLLQIAIELEAIALKDEYFIERKLYPNVDFYSGIIYKAMGIPSQMFTVLFAIARTVGWMAQWKEMHEDPEQKISRPRQLYTG

SEQ ID NO: 11032 - protein, 424 aa, Atriplex prostrata
YLRAIAAKITERKDHFVKLETLDSGKPFDEALLDIDDVAGCFEYYADQAEALDAKQKAPIALPMDTFKSHVLRQPIGVVGLISPWNYPLLMATWKVAPALAAGCAAILKPSEMASVTCLELADVCKEVGLPPGVLNILSGYGPEAGGPLASHPDVDKVAFTGSTATGSKIMSSAAQLVKPVTLELGGKSPIILFEDVDLDQAAEWAAFGCFWTNGQICSATSRLLVHESIAAEYLDKLVKWCKNIKISDPFEDGCRLGPVVSKGQYEKVLKFISTAKSEGATILCGGSRPEHLKKGYFIEPTIISDVSTSMQIWKEEVFGPVLCVKTFSSDEEAIELANDTQYGLGAAVLSKNLERCEKVTKALEVGIVWVNCSQPCFCQAPWGGAKRSGFGRELGEWGIENYLNIKQVTSDISDEPWGWYKSP

SEQ ID NO: 11033 - protein, 399 aa, Bacillus cereus ATCC 10987
MLENQINERSLLLHKELVGKIEITSKVEVNSADDLSLTYTPGVAESCKAIAADEETVYDYTARGNMVAVISDGTAVLGLGNIGPKAAMPVMEGKSILFKKFANVDAFPLCLGTTDVDEIVTLVKNLEPTFAGINLEDIAAPRCFEIEKRLKEETNIPVFHDDQHGTAIVVLAAVINALKVVRKQMDHVKIVINGAGSAGIAIGKLLLKAGAQHITLVSLEGIVCEGETWMNEAQIEVSKKTNREHVRGTLKEAIHQADIFIGVSAPNVLTKEFVQTMNEKAIVFAMANPIPEIFPEDALEAGAAVVGTGRSDYANQVNNVLAFPGIFRGALDVRATDITEEMKLAAAYGIANIITDEERNANYVIPNPLDKRVVPSVAEAVAKAAIDSGVARITRIPSY

SEQ ID NO: 11034 - protein, 500 aa, Atriplex prostrata
MAFPIPVRQLFIDGEWREPLLKNRIPIINPSTEEIIGDIPAATAEDVEVAVVAARKAFKRNKGRDWAATSGAHRAKYLRAIAAKITERKDHFVKLETLDSGKPFDEAVLDIDDVASCFEYFAGQAEALDAKQKAPVTLPMDRFKSHVLRQPIGVVGLISPWNYPLLMATWKIAPALAAGCTAVLKPSELASVTCLEFGEVCNEVGLPPGVLNILTGLGPDAGAPIVSHPDIDKIAFTGSSATGSKIMASAAQLVKPVTLELGGKSPVIMFEDIDIETAVEWTLFGVFWTNGQICSATSRLLLHESIAAEFVDRMVKWTKNIKISDPFEEGCRLGPVISKGQYDKIMKFISTAKSEGATILCGGSRPEHLKKGYYIEPTIITDITTSMQIWKEEVFGPVICVKTFKTEDEAIELANDTEYGLAGAVFSKDLERCERVTKALEVGAVWVNCSQPCFVHAPWGGVKRSGFGRELGEWGIENYLNIKQVTSDISDEPWGWYKSP

SEQ ID NO: 11035 - protein, 624 aa, Zea mays
AHTPDAFAPRIPLAGGRLYQPGRCWEDVFDAISNARHLIYITGWSVYTEITLLRDGSRPRPGGEATLGELLKRKASEGVRVLMLVWDDRTSVESLGMKWGFMSTHDAETAEYFRGSGVHCVLCPRNPDAGSSAVMGAQIAYMITHHQKIVVVDHEMPAKRSDRRRILSFVGGLDLCDGRYDTQFHSLFRTLDTAHHKDFHQPNLAGASIDNGGPREPWHDIHSKIEGPAAWDVLYNFEQRWRKQGGGIDLLVNLKAMADLIIPPSPVMFPEDQDSWNVQLFRSIDGGACFGFPSTPEAAAQSGLVSGKNNVLDRSIHDAYIHAIRRAKHFIYIENQYFLGSSFAWKADGIKPEEIEALHLVPRELSLKIVSKIEAGEHFAVYVVLPMWPEGPPASGSIQGILDWQRRTMEMMYNDISVALDAKRIDRDPRDYLTFFCLGNREVKMDGEYEPSGRPLDGTDYARAQNARRFMIYVHSKMMIVDDEYIIVGSANINQRSMDGGRDSEIAMGAYQPCHLNTKGQVARGQVHGFRMSLWYEHLGMLHDDFLNPGSLECVRRVNQMADRYWDLYAGDSLDADLLGHLLRYPVTVTKEGTVTELPGAKFFPDTQALVLGALSKLPPILTT

SEQ ID NO: 11036 - protein, 479 aa, Agrobacterium tumefaciens str. C58
MSLKTAPVIVWFRKDLRLSDNLALLAAVEHGGPVIPVYIREKSAGPLGGAQEWWLHHSLAALSSSLEKAGGRLVLASGDAERILRDLISETGADTVVWNRRYDPTGMATDKALKQKLRDDGLTVRSFSGQLLHEPSRLQTKSGGPYRVYTPFWRALEGSDEPHAPADPPKSLTAPKVWPKSEKLSNWKLLPTKPDWAKDFSDIWTPGETGALDKLDDFIDGALKGYEEGRDFPAKPATSLLSPHLAAGEISPAAVWHATKGLSRHIASNDISRFRKEIVWREFCYHLLFHFPELGEKNWNDSFDAFSWRDDEKSFKAWTRGMTGYPIVDAGMRQLWQHGTMHNRVRMIVASFLIKHLLIDWRKGEKWFRDTLVDADPASNAANWQWVAGSGADASPFFRIFNPILQGEKFDGDGDYVRRFVPELEKLERKYIHKPFEAPKDALKKAGVELGKTYPLPIVDHGKARERALAAYAAVKKTT

SEQ ID NO: 11037 - protein, 365 aa, Triticum aestivum
  unsure (1)..(365): unsure at all Xaa locations
HVYRPLGLGFDLSTTPPSSFPFPVALPPPPHILDSPFSWRPRRRRRRGGRSCRRPGRGGGGGRGRGGGGRRGRGQEPRAQGGGAGEGITDRRIRVXPTDLYHLFHLGHARSLXEQAKKSLTNSYLVVGCYNDELTQQNKGRAIITEDERYXSLQAICKWVDEVIPDAPWVVTEEFLNKHNIDFVAHDSLPYHDASGASNDVYEFVKKLGKFKETKRTEGISTSDIIMRIVKDYNEYVMRNLARGYSRNDLGVSYVKEKRLRVNMGLKTLRDKVKQHQEKVGEKWSTVAKLQEEWVENADRWVVGFLEKFEEGCHSMGTAIKERIQERLKEAQSRDFSLLQYDSDDFDDFEEEDDEVAKDAKYVKE

SEQ ID NO: 11038 - protein, 166 aa, Triticum aestivum
  unsure (1)..(166): unsure at all Xaa locations
ATSVAPFQGLKSTAALPVSRRSNGASLXSVSNGGRIRCMQVWPIEGIKKFETLSYLPPLSTEPLLKQVDYLIRSKWVPCLEFSKVGFIFREHNASPGXYDGRYWTMWKLPMFGCTDATQVINEVEEVKKEYPDAYVRIIGFDNMRQVQCVSFIAFKPPGCEESGKA

SEQ ID NO: 11039 - protein, 441 aa, Arabidopsis thaliana [sequence omitted]

SEQ ID NO: 11040 - protein, 252 aa, Triticum aestivum
MMGYQKGVDIEAGTSGGGTGTTAPTRGLYPGMTESPELRWALIRKIYVILSLQLLLTAVVAAVVVKVRAIPHFFVSSSAGLGLYIFLIIFPFIVLCPLYFYRQKHPVNLLLLGVFTVAISFAVGMTCAFTSGKVILEAAILTTVVVFSLTAYTFWAAKRGQDFSFLGPFLFASLIMLLVFGFIQILFPMGKLSHMIYGALAALIFSGYIVYDTDNIIKRYTYDEYVWAAVSLYLDVINLFLALLTLFRAGDS

SEQ ID NO: 11041 - protein, 494 aa, Mycobacterium bovis AF2122/97
MLEACQAIGVTAALGEPGEHSLPASTPITGDVLFSIAPTTPEQADHAIAAAAATFTAWRSTPAPVRGALVARLGELLTAHQQDLATLVTVEVGKITAEARGEVQEMIDVCQFSVGLSRQLYGRTIASERAGHRLLETWHPLGVVGVITAFNFPVAVWAWNTAVALVCGDTVVWKPSELTPLTALACQALLSRAAADVGAPAAVGGLLLGGAERGAQLVDDPRVALLSATGSVRMGQQVGPRVARRFGRVLLELGGNNAAIVAPSADLELAVRCIVFAAAGTAGQRCTSLRRLIVHRSVADDVVARVVGAYRQLAIGDPSAPDTLVGPLIHEAAYRDMVAALERARTDGGEVIGGDRREVGSPGAYYVAPAVVRMPSQTAIVATETFAPILYVLTYDDLDEAIALNNAVPQGLSSSIFTTDLREAEHFLDQSDCGIANVNIGTSGAEIGGAFGGEKQTGGGRESGSDAWKAYMRRATNTVNYSSELPLAQGVKFG

SEQ ID NO: 11042 - protein, 133 aa, Glycine max
  unsure (1)..(133): unsure at all Xaa locations
MGRLNQMPSTIVKEKPRIQAKVTEEQAWRNYERIRLTKRPYTAXRDEVPLRGNLKQTYATNETAKKLWRLLKNHPANGTTLRTLGALEPAQVTQRAKHWDTNYASGWQRSATHTTSNEPGPDXLAEHPNDTGP

SEQ ID NO: 11043 - protein, 114 aa, Nicotiana tabacum
MEMVSKIACFVVLCMVVVAPHAEALTCGQVQSSLAPCVPYLLGRGPLGGCCGGVKRLLGAARTPADRKTACNCLKSAANTFKGIDMGNAARLPGTCGVNIPYKISPSTDCSKVQ

SEQ ID NO: 11044 - protein, 308 aa, Zea mays
MDGGRPEMRRTMTLSEQLASTPDPAIRDFLKIPQDADVGGILHDEDSPSAVDAQGPRAGRTSGWKPLRDRLRLRRAAGAWQTPPNKPGAAAAHAPTNSGNLSNRYNYNPGEAAAAFSRTFSRAPSLRAPSLRATPTFSRVASTRLGPASSRSSSRRPATYDFRDVDERRHDADADDGGEEEDDEGEGDDDDDEGDEEDEKEEAPAAQMSLMALLEQTDSQWDDDEDEEESGGGGGARKKGEGDDDEDDGEGREEEMVHVCCVCMVRHKGAAFIPCGHTFCRLCSRELWVSRGNCPLCNGFIQEILDIF

SEQ ID NO: 11045 - protein, 262 aa, Triticum aestivum
RSARRSPRGSRRWRWSRPPRPRRPRRRWPPAGGGVEDKYGEDRATEELPVTPWAFSVASGYTLLRDPHHNKGLAFTERERDAHYLRGLLPPGVVSQDLQVKKIMHNLRQYKVPLQRYVAMMDLQERNERLFYKLLIDNVEELLPVVYTPTVGEACQKYGSIFRRPQGLYVSLRDKGKVIDVLRNWPERNIQVIVVTDGERILGLGDLGFRPTACLPITIDVGTNNEQLLNDEFYIGLRQRLATGEEYHELTEEFMVAVKQIY

SEQ ID NO: 11046 - protein, 338 aa, Heterocapsa triquetra
PAVSPPTPARTSAMGNACSEGCFAGFASPDPRVKELKALEGDLKNLINTLNCNPILVRLAWHDSGTFDQRIQGWPQCGGANGAIRFDPEMNFGANAGLAKAKGYLDKFVEKYPSLSWADMIQMASAVSIEMAGGPKIPMKYGRVAVTSPDQCVGSASREGFEGNAGLPDPIPGGNGKFPCGATGPAAHLRNVFTKKMGFTDQEIVALSGAHTIGRAYKERSGTCPFGYMDASASKYSKSSCIVRKDGKAGIGMPGGAAWTKNWLTFDNSYFTKFKEAMEDDHLLWYPTDECLHQDPAFRPIFMKYAESQAAFFEDYAKAHKKLSELGAKFDPPNGITI

SEQ ID NO: 11047 - protein, 198 aa, Zea mays
  unsure (1)..(198): unsure at all Xaa locations
MATSFQGTTTKCTACDKTVYLVDKLTADNRVYHKACFRCHHCKGTLKLANYNSFEGVLYCRPHFDQLFKRTGSLDKSFQGTPKVVKPERNVGNENATKVSSAFAGTREKCVGCSKTVYPIERVTVNNTMYHKSCFKCCHGGCTISPSNYIAHEGKLYCKHHHVQLIKEKGXTSASSRMTTRRHRRLGRWRTTKKKSID

SEQ ID NO: 11048 - protein, 505 aa, Oryza sativa (japonica cultivar-group)
MEREAWLLCAALAAAMVYYYYYYLACTTRRAQRRLPPGPTPLPVIGNVLSLSGDMHHELARLAREQYGPVMTLKLGLFTAVVVSSPDAAREAFTKHDRRLAARTVPDISRARGLTGRSMIWLPSSDPRWKTLRSAVATHFFSPRSLAAARGVRERKVRDIVNYFAGHAAEVIDVGEAVYGGVINIVSNAFFSADVVDVGKESAHGLRETLEDIILAIAKPNVSDLFPFLRRLDLQGWRRWAEKRYDKVFGILDDKINSRLADADADASTKKHGDFLDSLLELMSAGKIACDDVTTVMFDAFGAGTDTISNTVVWAMAELLRNPSIMAKVRAEMEDVLAGKKTIEENDTEKLPYLRAVIKEAMRLHPVAPILLPHRAAEDGVEIGGYAVPKGSTVIFNVWTIMRDPAAWERPEEFMPERFLQRAEVDFRGKDFEFIPFGAGRRLCPGLPMTERVVPFILASLLHAFEWRLPVGVAAETLDLSEKFTTVNVLVTPLKAIPILASHQI

SEQ ID NO: 11049 - protein, 199 aa, Magnaporthe grisea 70-15
MAAPGVQSLKCVVTGDGAVGKTCLLISYTTNAFPGEYIPTVFDNYSASVMVDGKPISLGLWDTAGQEDYDRLRPLSYPQTDVFLICFSIVSPPSFDNVKAKWYPEIDHHAPNVPIILVGTKLDLREDPSTLESLRSKRMEPVSYDQALICAKEIRAHKYLECSALTQRNLKSVFDEAIRAVLNPRPQPAKVKKSKCTIL

SEQ ID NO: 11050 - protein, 300 aa, Isochrysis galbana
KPHVAMDDQMYVNAVKSDIRKALVNQKGNSCPLAVRLAWHASGTYSKHDDTGGSYGATMRFPPEKEDGANAGLDIERDILQEVKRQHPDLSYADIWTLAGAHAIEIAGGPPIEHKLGRTDAQDGSACPAVGRLPDASQGAEHLREVFYRMGFNDEDIVALSGAHTLGRCHKTRSGFDGPWTHEPLKFDNSYFKNLLDLEWKPRQWDGPLQYEDPSHTLMMLPTDLALKTDPKFKEYVVAFAKSETVFRSAFKRAYEQLLCLGCPAHVVPSAAPVAMQSREEADGSLEFAQAARAAGGDPA

SEQ ID NO: 11051 - protein, 431 aa, Methanopyrus kandleri AV19
MAAESIAKAVHDVLATWGAQGPGAIFFLVWAAVLVVGMQLGFMFLEAGQVRTKNVVSVLMKNLLDLSLGGIVFIFFGFALAFPDYAQSIGKWIATMFTANPWSADPMKAADPYNLAYCFFQFAFCATAATIVSGAVAERINFKACLVMTVLITGLLYPIFVLWTWGGGWMGGDTGLFAKVFGQPYHDFAGSTVVHAIGGFLAMAAAYLLGPRIGRFKNGKPVPIPGHNIPQAFLGALFLAITWYGFNVGSSAVLYDPTNESWISSLVATLAMCGGAAAAAFTTRFDPLWAANGLIAGLVAICAGCDIMSPFGALLTGIVAGLIIKPAFRLLEKLEIDDVVAACPVHGFAGVWGAIAAGIFGAEALGGAGGVSLAAQIVGALVCIAWALGSGFATFYVIDKVIGLRATEEEEKGLDETEFGVSAYPYMETRD

SEQ ID NO: 11052 - protein, 129 aa, Brassica napus
MEHGSFTNDSFASFTLAEEDHTLANAVRFMLNQDPRVTFAGYSIPHPSLECVNVRVQTTGDPAREVLKDACQELMLMNRHVRSVFDKAVSEFKVEQARLAAEEEKNRKAEEEELKKQRDLLASMDIESD

SEQ ID NO: 11053 - protein, 389 aa, Sulfolobus acidocaldarius
MWIKGKAYYEGEIKEICINFDRSIKEIRANCKPDMTFTNEELILPASVDLHVHVRGAQLSYKETVATATSEAVYGGVGVIVDMPNTVPYINTPERIKERLREFQLYSRTDYGIYSGVSKEVEEIDKLPIAGYKIYPEDLEKEETRYVLEKSKKLKILHPEMPFVSKIERSLRRSYWMETAAINLVKGNMHITHITNFETLQLAKSMGFTTDITAHHLVVDGERDCISKVNPPIRDYVTRLKLFLKGLFEVDCIASDHAPHSKEEKRMNFDLCPPGIAGVSFSTPYIYSLMFKGLISIDRAVSLLSGNPSRILNIPTGKIKEGYRANFTVIKRENWRYTTKFSKVTETPMDGFSLDAKVTNVIVEGKLAFDGENVYPIRGVNIFDSSSRS

SEQ ID NO: 11054 - protein, 136 aa, Glycine max
  unsure (1)..(136): unsure at all Xaa locations
SQILXXNSGVFKDIVLKRNXXXGPVLVYPMNRNKWYDRMSASIPDEEVFYTVGFLHSSGFDTWKAYDAQNSEILEFCRDAGIKVKQYLPNHSTQEDWTNHFGAKWMKFLERKHQFDPRMILSPGQKIFHKKLQPVF

SEQ ID NO: 11055 - protein, 483 aa, Burkholderia cepacia R18194
MDEQLITGRLLIDGELVDSETGEWAASINPATEAVIGRAPAGSRRDVARAVDAAQRAWPAWAERTGEERGELLRGFGERLLERAEELSRIEVLDSGNTYVPTLASMHETVRSLRYYAGLVHGLHGETIPATGRNLHMTVYEPYGVVGRIAAFNHPAMFSAARTASALVTGNTVVVKPPETSPLSVLVLGEVARDTLPAGVFNIVNGTGAEVGDALVRHPDVKRLALIGSVATGQAIQRSAAEVGVKHVTLELGGKNPMIVFPDADPDAAADSAVRGMNFSWQGQSCGSNSRLLVHDDIYDDVLARVVERVAAIRVGDPMSPDTGMGPINSRKSYDHVMSFLDPAQTHGARLMTGGRRPPGHAFEKGFWVEPTVYADVTPGMRLWREEVFGPILSVARWRDVDEVVAMANDTEYGLSAAIWTNDIRQALNTARRIRAGSVFVNGSNTHFLGVPWGGFKNSGVDREEGIEEMYSYVEKKVINVML

SEQ ID NO: 11056 - protein, 411 aa, Rickettsia sp. DaE100R
DSEFAELKIRGKIFKLPILKASIGEDVIDISRVSAEADCFTYDPGFMSTASCQSTITYIDGDKGILRHRGYDIKDLAEKSDFLEVAYLLIYGELPSGEQYNNFTKQVAHHSLVNERLHYLFQTFCNSSHPMAIMLAAVGSLSAFYPDLLNFKEADYELTAIRMIAKIPTIAAMSYKYSIGQPFIYPDNSLDFTENFLHMMFATPCTKYTVNPIIKNALNKIFILHADHEQNASTSTVRIAGSSGANPFACISTGIASLWGPAHGGANEAVINMLKEIGSSEYIPKYIAKAKDKNDPFRLMGFGHRVYKNYDPRAVVLKETCKEVLKELGQLDNNPLLQIAIELEAIALKDEYFIERKLYPNVDFYSGIIYKAMGIPSQMFTVLFAIARTVGWMAQWKEMHEDPEQKISRPR

SEQ ID NO: 11057 - protein, 300 aa, Triticum aestivum
  unsure (1)..(300): unsure at all Xaa locations
LQYEVLQWCICRLEAWFATDVDNISLKNWDQEHVLTGGHGLMVNGYDPVIKALSRDLDVHLNHRVTKIIQRYNKVIVCVEDGTSFVADAAIITVPLGVLKANIIKFEPELPDWKLSAISDLGVGLENKIALRFNTIFWPNVEVLGRVAQTSNACGYFLNLHKATGHPVLVCMVAGRFAYEMEKLSDEESVNFVMSQLRRMLPGATEPVQYLVSRWGTDPNSLGSYSCDLVGKPADLYERFCAPVGNLFFAXGEAACIDHSGSVHGAYSSGIGAAEDCRKAPLDQLGISDLFKSGRCDRRL

SEQ ID NO: 11058 - protein, 80 aa, Triticum aestivum; identical to SEQ ID NO: 310

SEQ ID NO: 11059 - protein, 390 aa, Zea mays
  unsure (1)..(390): unsure at all Xaa locations
MAGGAGNGSNEAVQAKGSGXDGSHAKPVSPRWVKARSAAPESYASCHTTMIXGWXTKPRSHCGKATKVQYYNNPMWPGEAHSLKVENILYQGKSPYQEVLXVFESSTYGKVLVXLDGIVQLTDKDECAYQEMITHLPLCSIPSPKKVLVIGGGXMGGVLREISRHSSVESIDICEIDQLVIDICKXFFPHLSVGFEDPRVQLHVGDAVEFLRNAPEGTYDAIIVDSSDPIGPAQELVEKPFFETIARALRPGGVLCNQAESMWLHTHLIQDMLSICRETFKGSVRYAWASVPTYPSGVIGFLLCAKDGPPVNFLTPVNPIEEVEGATKAGREIRFYNSEXHMAAFVLPTFAKRELEAYCASTETEQAEEVAATAPQKLTAAPKRGITTAS

SEQ ID NO: 11060 - protein, 169 aa, Brassica napus
MDTVIGSIDACNPTTGDICRPPNGAVSTVQNSPPAHSTTISPCDATLGRYLARRLVEIGVTDVFSVPGDFNLTLLDHLIAEPSLKLIGCCNELNAGYAADGYARSRGVGACVVTFTVGGLSVLNAIAGAYSENLPLICIVGGPNSNDYGTSRILHHTIGLPDFTQELRC

SEQ ID NO: 11061 - protein, 113 aa, Rickettsia sp. Hf332
ANEAVINMLKEIGSSEYITKYIAKAKDKNDPFRLMGFGHRVYKNYDPRAAVLKETCKEVLKELGQLDNNPLLQIAIELEAIALKDEYFIERKLYPNVDFYSGIIYNAMGIPTQ

SEQ ID NO: 11062 - protein, 510 aa, Sinorhizobium meliloti
MNIAAKKIDVASEAAALLDKMGVAKDLYTGGDMPSFSPVTGEKIASLKTVSAAEAAGKIEKADEAFRAWRLVPAPKRGELVRLLGEELRAFKADLGRLVSIEAGKIPSEGLGEVQEMIDICDFAVGLSRQLYGLTIATERPGHRMMETWHPLGVVGIISAFNFPVAVWSWNAALALVCGDAVVWKPSEKTPLTALACQAILERAIARFGDAPEGLSQVLIGDRAIGEVLVDHPKVPLVSATGSTRMGREVGPRLAKRFARAILELGGNNAGIVCPSADLDMALRAIAFGAMGTAGQRCTTLRRLFVHESVYDQLVPRLKKAYQSVSVGNPLESAALVGPLVDKAAFDGMQKAIAEAKNHGGAVTGGERVELGHENGYYVKPALVEMPKQEGPVLEETFAPILYVMKYSDFDAVLAEHNAVAAGLSSSIFTRDMQESERFLAADGSDCGIANVNIGTSGAEIGGAFGGEKETGGGRESGSDAWKAYMRRATNTVNYSKALPLAQGVSFDIE

SEQ ID NO: 11063 - protein, 296 aa, Saccharomyces cerevisiae
MITTPLVHVASVEKGRSYEDFQKVYNAIALKLREDDEYDNYIGYGPVLVRLAWHISGTWDKHDNTGGSYGGTYRFKKEFNDPSNAGLQNGFKFLEPIHKEFPWISSGDLFSLGGVTAVQEMQGPKIPWRCGRVDTPEDTTPDNGRLPDADKDAGYVRTFFQRLNMNDREVVALMGAHALGKTHLKNSGYEGPGGAANNVFTNEFYLNLLNEDWKLEKNDANNEQWDSKSGYMMLPTDYSLIQDPKYLSIVKEYANDQDKFFKDFSKAFEKLLENGITFPKDAPSPFIFKTLEEQGL

SEQ ID NO: 11064 - protein, 201 aa, Neisseria gonorrhoeae
MMTLYSGITCPFSHRCRFVLYEKGMDFEIKDIDIYNKPEDLAVMNPYNQVPVLVERDLVLHESNIINEYIDERFPHPQLMPGDPVMRGRGRLVLYRMEKELFNHVQVLENPAAANKEQAKAREAIGNGLTMLSPSFSKSKYILGEDFSMIDVALAPLLWRLDHYDVKLGKSAAPLLKYAERIFQREAFIEALTPAEKAMRK

SEQ ID NO: 11065 - protein, 445 aa, Sinorhizobium meliloti
MNAHNKPNAPVLDSYWMPFTANRQFKAAPRLLAAAEGMHYTSVDGRTVLDGTAGLWCVNAGHGRRQIAAAVERQLSTMDFAPSFQMGHPIAFDFAERLAEIAPGPAGAKLDRVFFTGSGSESVDTALKMALAYQRSIGQGTRTRLIGRERGYHGVGFGGISVGGIVNNRRVFPQLPGSDHLRHTHDPAKNAFVKGQPEHGAELADDLERLVALHGAETIAACIVEPVAGSTGVLIPPKGYLERLRAICDKHGILLIFDEVITGFGRLGAAFATDYFGVTPDIVTTAKGLTNGAIPMGAVFASRKVHDALMHGPEGQIELFHGYTYSGHPAACAAGIATLDIYRDEGLMTRAAEIEGDWHEAMHSMKGLPHVIDIRTIGLIAGIELQSRDGAPGARAYDVFVDCFERGLLIRVTGDIIAFSPPLIAEKQHFGEIVSILADALKRVK

SEQ ID NO: 11066 - protein, 296 aa, Saccharomyces cerevisiae
MIVEKLVHVASVEKGRSYEDFQKVYNAIALKLREDDEYDNYIGYGPVLVRLAWHISGTWDKHDNTGGSYGGTYRFKKEFNDPSNAGLQNGFKFLEPIHKEFPWISSGDLFSLGGVTAVQEMQGPKIPWRCGRVDTPEDTTPDNGRLPDADKDAGYVRTFFQRLNMNDREVVALMGAHALGKTHLKNSGYEGPQGAANNVFTNEFYLNLLNEDWKLEKNDANNEQWDSKSGYMMLPTDYSLIQDPKYLSIVKEYANDQDKFFKDFSKAFEKLLENGITFPKDAPSPFIFKTLEEQGL

SEQ ID NO: 11067 - protein, 182 aa, Novosphingobium aromaticivorans DSM 12444
MPDTLAAIPLTRIDGTADSLANHAGKVLLVVNVASKCGLTPQYEGLEALYKARKDEGLEVLGFPANDFGAQEPGSHEEIAEFCKLNYGVSFPLFAKADVTGPGKQPLYAALTEAAPTKQGPAQEFRDRLKGYGMTPTEDPEVLWNFEKFVIGRDGEVAARFAPGVTPDDPALLAAIDAELAK

SEQ ID NO: 11068 - protein, 396 aa, Wolinella succinogenes
MRIREGKIVEIQKSILPEKGEEVVLAEGLSLLPAMVDLNVRVANDSLTGKNLATLAKKAAKGGVGSLALMPDCSPSLDNEAAIELLNSYKGELPASIFPIASATKKEDGKLSDLSILHKMGCRGIAIESSLDGNLSRRVCEYSLMMKAPIFCRCEDVSLRGSGVMNDGYLSSRMGLPGIPSLSETKEVAKMAETAIFMRTPVLFQALANERSLRIIERAKEENPSLFAEVSIHHLAITEDFCSGFNTGAKIRPPLKSESTRKKLLQLLKEGVVDVVTSLQSEHSLSKKDVAFEEAAFGVDNIENHFSLCYTYLIKQGRLSMSDLSRVTAKRAAEILGLESKGYVGVGADADLILVDIKSSKVVEDNFSPYYNSILYGEVERTIIAGETVYKREKKG

SEQ ID NO: 11069 - protein, 416 aa, Wolbachia endosymbiont of Drosophila melanogaster
MDKKVLLELSNGLKIELPVLSGTTGPDVLNIKDLYKMTGLFTYDPGFVSTASCSSTITFIDGDEGVLKYRGHNIADLAENNNFTAVIYLLLYGELPSSEQHKKFLLKIQESSKVSEQVTNVIKAFPKTAHPMSILVACFASLSASYHEKHGNNVNGEDLDFGISAIAQVSTIIAMIYRHINNQEFINANNELSYSENFLKMIFGDAVDNDKSALFAKALDKIFTLHADHEQNASTAAVRLVGSAGSNLFASLSAGVATLWGPAHGGANEAVINMLKEIEQSGDIDKFIEKAKDDKDPFKLMGFGHRVYKNYDPRARILEGACHEVLSKLEQNNELLKIAKKLEEIALKDEYFIVRKLYPNVDFYSGIIMNAIDIPSNMFTPIFALARTTGWVTQWYEMINDKETKICRPRQLYFGK

SEQ ID NO: 11070 - protein, 512 aa, Shewanella oneidensis MR-1
MSVNQNRSGKHALMWFRQDLRLTDNQAFTAACDWVRQHHAAKLKAIYIATPSQWHQHDIAPIQLDFIQRHVNLLAQGLVSLGVEFELIQLDSFRDIPAFLTSYCEEHSIGRVFAGQEPEINEQKRDQACVEAGIPLSLSDEHCLLPPGTVLNLSGDMYRVFTPFSRKWREVAAKQAILPLGVPAPLGSILSEPKPLFFKNIGSTYLAASKDIASSKKGFNQTAPNPLISSEQWAAGEGQAKRLLNQFIQQKVQDYKQDRDFPAIDGTSVISPYLAIGVLSPRQCVAALLQRFPEVIVDDTSPGRTWLNELIWREFYRHLLVAFPDLSKGNNFNRQADHVLWRNNQSEFLAWCEGKTGYPIVDAAMRQLNQTGWMHNRLRMVVASFLTKHLLIDWRWGERYFRQHLIDGDLAANNGGWQWSAGCGCDAQPYFRIFNPMSQSEKFDPDGRFIRKYLPELASWGVTRLHQPNQQKMPSLFEAPLFASQADYPNAIVEHNAARARALTVLGVLKKA

SEQ ID NO: 11071 - protein, 478 aa, Desulfitobacterium hafniense DCB-2
MTVIRYDNQMIVIDAGLAFPEDEMLGIDIVIPDYSYLLEHKDMVQGILVTHGHEDHIGALPYLLKDLDAPIFATRLTLGLIQSKLKEGNLDNIKATVVRPRDTVKLGVFKVEFLSVNHSIPDAVALAIHTPLGTIVHTGDFKVDHTPVMGEKIDIHKFAELGDKGVLCLMSDSTNVERPGFTMSERSVGHMFEEAFNSAKDRIIIASFATNVHRLQQVITAAHHTNRKVAVVGRSMVNTVAIASELGYLDIPEDTLVDVDEVVNLPGNQACILTTGSQGEPMSALTRMAMSDHRRIEIQPGDTVIISANPIPGNEKSVSKTIDLLFKLGANVIYESYQGMHVSGHASQEELKLMLNMIRPQYFIPVHGEYRMLIKHAKLAEQMGISRENTFVADNGTIVEFTRHGASIAGKVPAGKVLIDGLGVGDVGNIVLRDRKQLSQDGILIVVMTISRSSGAIVAGPDVVTRGFVYVRESESML

SEQ ID NO: 11072 - protein, 63 aa, Zea mays
  unsure (1)..(63): unsure at all Xaa locations
GQVGVNRLQYDQLRAPVGRVFLTGEHTSELYNGYVHGDYLSGIDXDAILINRTQKKMCKYNVH

SEQ ID NO: 11073 - protein, 116 aa, Triticum aestivum
  unsure (1)..(116): unsure at all Xaa locations
MAPTVMASSATSVAPFQGLKSTAGLPVSXRFSXRXXXSLGSVSNGGRIRCMQVWPIEGIKKFETLSYLPPLSTEGPLLKQGSTTPDXRSQWVPCLEFSKGGVHSSREHNAFSGYYD

SEQ ID NO: 11074 - protein, 57 aa, Glycine max
MAGDSAATCIDILLAIILPPLGVFLKYGCQVEFWICLVLTLFGYIPGIIYAVYAITK

SEQ ID NO: 11075 - protein, 177 aa, Triticum aestivum
  unsure (1)..(177): unsure at all Xaa locations
MAPTVMASSATSVAPFQGLKSTAGLPVSRRSNGASLGSVSNGGRIRCMQVWPIEGIKKFETLSYLPPLSTEALLKQVDYLIRSKWVPCLEFSKVGFIFREXHTHPPGYYDGRYWTMWKLPMFGCTDATQVINEVEEVKKXEYPDAYVRIIGFDNMRQVQCVSFIAFKPPGCEESGKA

SEQ ID NO: 11076 - protein, 294 aa, Saccharomyces cerevisiae
MKTLVHVASVEKGRSYEDFQKVYNAIALKLREDDEYDNYIGYGPVLVRLAWHISGTWDKHDNTGGSYGGTYRFKKEFNDPSNAGLQNGFKFLEPIHKEFPWISSGDLFSLGGVTAVQEMQGPKIPWRCGRVDTPEDTTPDNGRLPDADKDAGYVRTFFQRLNMNDREVVALMGAHALGKTHLKNSGYEGPGGAANNVFTNEFYLNLLNEDWKLEKNDANNEQWDSKSGYMMLPTDYSLIQDPKYLSIVKEYANDQDKFFKDFSKAFEKLLENGITFPKDAPSPFIFKTLEEQGL

SEQ ID NO: 11077 - protein, 359 aa, Kluyveromyces marxianus
MSKNIVVLPGDHVGTEITNEAIKVLNAISEARPSIKFNFEHHLIGGAAIDATGVPLPDEASKKADAVLLGAVGGPKWGTGSVRPEQGLLKIRKELGLYANLRPCNFASDSLLDLSPLKPEYAKGTDFVVVRELVGGIYFGERKEDEGDGVAWDSEKYSVPEVQRITRMAAFLALQHNPPLPIWSLDKANVLASSRLWRKTVEETIKNEFPQLTVQHQLIDSAAMILVKSPTKLNGIVITNNMFGDIISDEASVIPGSLGLLPSASLASLPDTNKAFGLYEPCHGSAPDLPANKVNPIATILSAAMMLKLSLDLVEEGRAVEEAVRKVLDSGIRTGDLGGSNSTTEVGDAVAKAVKEILA

SEQ ID NO: 11078 - protein, 468 aa, Zea mays
TASAVLCAPRTRLVGSSIQLPPDVDQLPILTTKVKRRVGKYELGRTIGEGTFAKVRFAKNTETGEPVAVKILDKEKVLRHKMAEQIKREISTMKLIKHPNVVRIYEVMGSKTKVYIVLEYVTGGELFDTIANQGRMREGEARSYFQQLINAVDYCHSRGVYHRDLKPENLLLDSYGNLNVSDFGLSALSQQIKDDGLLHTTCGTPNYVAPEVLEDQGYDGAMADLWSCGVILFVLLAGYLPFEDSNLMTLYKKISNAEYTFPPWTSFPAKRLLTRILDPNPMTRITIPEILEDEWFKKGYKRPEFDEKYDTPLDDVDAVFNDSEEHHVTEKKEEEPVALNAFELISRSAGLNLGNLFDSEQEFKRETRFTSKCPPKEIIRKIEEAAKPLGFGVQKKNYKLRLEKVKAGRKGNLNVATEILQVAPSLHMVQVRKAKGDTLEFQKFYKNLSKTLKDVVWKSEDLQMRAAS

SEQ ID NO: 11079 - protein, 142 aa, Saccharomyces cerevisiae
MADQVPVTTQLPPIKPEHEVPLDAGGSPVGNMGTNSNNNNELGDVFDRIKTHFPPAKVKKIMQTDEDIGKVSQATPVIAGRSLEFFIALLVKKSGEMARGQGTKRITAEILKKTILNDEKFDFLREGLCVEEGQTQPEEESA

SEQ ID NO: 11080 - protein, 373 aa, Mycobacterium avium subsp. paratuberculosis str. k10
MTKPLTDTAPVDPGAQRGSMPLTNRIQGAVTSVGVKVIPWIPTAVRRGLVRGRSVIIDGNTLDPTLQLMLSGLRAVGIDGLVVDDDPELSRAQMHESTVGFPGPQIHVDVAELALPGPAGDIPARHYRPAGGETQAPLLVFYHGGGWSIGDLDTHDSLCRLTCRDAGIHVLSIDYRLAPEHPAPAAIDDAYAAFTWAHEHAGELGAIPGRVAVGGDSAGGNLAAVVSQLARDAGGPAPVLQWLIYPRTDFTARTRSLSLFSRGFLLTKRDIDWFESQYLRNSRLDRTDPRVSPALAESLAGLAPALIAVAGFDPLRDEGQSYAEALRAAGTPVDLRYLGSLTHGFANLFQLGGDSMVATSELISALRAHLSRV

SEQ ID NO: 11081 - protein, 281 aa, Mycobacterium avium subsp. paratuberculosis str. k10
MTGESGSAAPSIALNDENTMPVLGLGVAELSDDETERAVSAALEVGCRLIDTAAAYGNEAAVGRAIAASGIPRAELFVTTKLATSDQGFKGAMDACEASLERLGLDYVDLYLIHWPAPALGTYVNSFGGMIQSRGNGHARSIGVSNFTEEYLTTVIDLTFVTPAVNQIELHPLLNQEALRKTNAEHNVVTQSYTPLALGKLNDHPTVNSVAAEYGKTASQVLLRWNLQLSNAVIFRSANAEHIASDFDVFDFELAAEHMDAINALNDGTRLRPDPDTYEGS

SEQ ID NO: 11082 - protein, 384 aa, Corynebacterium glutamicum
MTSVIKKKAKFNTLSVSGVKKLTDDSVEVSFDVPEELQDDYDYIPGQYVALRATVDGEELRRSYSICDIPNKGTIRVGIKKDLGGKFSTWANEELQLGDVIDVMNPQGAFTSKIHVTSLNDAQNLVDSELGQVENPNFVAIAAGSGITPIMSIAQAVLKSLPKATFQLVYSNKGGADVMFADKIGDLKDKYPARFAVHHVLTREQRVNPLFSGRIDDEKMELLLDQVLRPDLVDEWFLCGPFELVQMCRDSLKERDIDEKRIRFELFSTGDPKSAPGGNAGRPVIADPKGKNISIQFQLDGLSGTIESPVSAKETVLNAALRARPDVPFACAGGVCGTCRAKVVEGDYEMDENYALEPDEVAAGYVLTCQTRPTGDCITVDYDA

SEQ ID NO: 11083 - protein, 511 aa, Saccharomyces cerevisiae
MSKSKTKTDKRNQSSLSRIKLSALHYCMSDAEPSIAYLQDNSAFINNEWHNLVLEKIFPVYNPSTEEDITQVSEKSQHDSTEEDITQVSEKSQHDDDKAVVDISERGRLLNILADLIERDRDILAAIEHLDNGKPFDEAYLLDLASVLKELRYTAGWADKLHGTLRFAITIPTFQDLRFLRYTRHEPVGVCGEIIPWNIPLLMYIWKIGPALAAGNTVVLKPEELTPLTALTVATLIKEAGFPPGVVNVVSGYGPTAGAACLSHKDNDKLAFTGSTLVGKVVMKAAAKSNLKKVTLELGGKSPMIVFIDADLDWAVENAHFGVFFNQGQCCIAQSRITVHESIYDEIVERDLEKAKKQVLGNPFESDTRYGPQILKIEFDSIPRLINSAKAEGAKVLCGGGRDDSCVGYYIQPTVFADVTDEMRIAKEEIFGPVITISRFKSVDEAIKRVDNTKYGLAAYVFTKDKAIRISAALKAGTVWVNCVHVASYQIPFGGNKNSGMGRELGEYGLE

SEQ ID NO: 11084 - protein, 355 aa, Azoarcus sp. CIB
MIPEFIDTWQMTEPGKLQKTRVPMPELQPGDVVVKIAGCGVCHTDLSYFYMGVPTVQKPPLSLGHEISGTVIGGEASMIGKEVIVPAVIPCGECELCKTGRGNRCLSQKMPGNSMGIYGGYSSHIVAQSKYLCVVENRGSTPLEHLAVVADAVTTPYQAAVRADLKKDDLVIVIGAAGGVGSFMVQTAKGMGAKAVIGIDINEEKLTMMKDFGADFVINPKDKSAKDVKELFKGFCKERGLPSNYGWKIFEVTGSKPGQELALSLLSFTGKLVIVGYGTAETNYMLSKLMAFDAEIIGTWGCPPDRYAAVRDMCLDGRIKLGPFVETRPMSQIEQVFDEAHHGKLKRRVILTPDF

SEQ ID NO: 11085 - protein, 506 aa, Oryza sativa (japonica cultivar-group)
MERDAWLLCAALAAATVVYYLACTTSRRAQRRRLPPGPTPLPVIGNVLSLRGNMHHALARLARERYGPVMALKLGLVTAVVVSSPDAAREAFTKHDRRLAARAVPDTSRVRGFADRSMIWLPSSDTRWKTLRGVVATHVFSPRSIAAARGVRERKVRDIVGYFAAHVGEVVDVGEAVYSGVVNLVSNAFFSGDVVDVGEESAHGLREAVEDIILAIAKPNVSDLFPFLRPLDLQGWRRWAEKRYDTVFDILDNITNSRLADASAGNHAGDFLDSLLGLMSYGKIARDDVTTIMFDVFGAGTDTIAITVQWAMAELLRNPSIMAKARTEMEDVLAGKKTIEENDTEKLPYLRAVIKEAMRLHPVAPILLPHQAAEDGVEIGGYAVPKGSTVIFNVWAIMRDPTAWERPDEFMPERFLQRAEVDFRGKDFEFMPFGAGRRLCPGLPMAERVVPFILASLLHAFEWRLPDGMSAEELDVSEKFTTANVLTVPLKAVPILASSASELQAS

SEQ ID NO: 11086 - protein, 497 aa, Bradyrhizobium japonicum USDA 110
MTPTAAARAQHATATLRDRLKDPSLLKEACYIDGAWVGTPVFAVNNPATGVELAKVPQLGADDTTKAVEAAERAFPAWAKHTAKQRSNILRKWFELIIANREDLALILTSEQGKPLSEALGEVDIGAAYIEFFAEEARRVYGETIPTQRPDARLLAIKQPIGVCGAITPWNFPNSMITRKVSPALAAGCTVVLKPANETPLSALALAVLAEKAGIPKGVLNIITGDAPPIGKVLCEHPAVRFVGFTGSTAVGKILYQQASVGVKRLGLELGGNAPFVVFDDADIDAAVEGAIVSKYRNMGQTCVCANRLYAQDKIYDEFVQKLSKKVAVMKIGDGTEAGVTQGPLINLKAVDKVERHIADAVKRGAKVVTGGKRSELGRSFFEPTVLADVKPDSLVAQEETFGPLAPVIRFKDEADVIAMCNASPFGLASYFYSRDLGRVWRVAEALESGMVGVNTGLITTEVAPFGGVKESGLGREGSRHGMEEYVEIKYVMMAGV

SEQ ID NO: 11087 - protein, 334 aa, Bacillus sp. KSM-K16
MSTVRNIALITSGGDAPGLNGAIAAIAQTPDVNLYFYHGGFDGIIEQDPIAISPTTAREAVQQGELLCFSGRSTHMLHEAGQKRVLEKLKQDCIDALIVCGGNGSAQGARSLSAGLPVAVVPMTIDNDIGGSEYTIGHDTAVNAIAESLHRLRQTAANLPGRIFMVETFGGRCGQLPLAAAVAASADIVLLPEYELNIDKFITEVNARSARGKSVIIVVSEGIYLNKRFSAGDQGVSFALARALEESTGKRVRLSILGYTQRAGDPTSYDCLMAKQMGQCAVDALLNGEKAMLVALKEGRVKAIPLTAIEQAPTLAKELLQLAFKENQLIQLEG

SEQ ID NO: 11088 - protein, 193 aa, Nicotiana tabacum
MAFAGTTQKCMACDKTAYLVDKLTADNRIYHKACFRCHHCKGTLKLGNYNSFEGVLYCRPHFDQLFKQTGSLDKSFEGTPKIVKPQKPIDSGKPQVAKVTSMFGGTREKCFGCKKTVYPTEKVSVNGTPYHKSCFKCSHGGCVISPSNYIAHEGRLYCKHHHIQLIKEKGNLSKLEGDHEMNSTTTTEVTAES

SEQ ID NO: 11089 - protein, 442 aa, Acinetobacter sp. ADP1
MLYSIFIAHQESWMVDQFDLEHIWHPYTSMINPLPTFKVKRASGVMIELDDGRQLIDGMSSWWCAIHGYNHPALNQAVKDQLEQMSHIMFGGFTHDPAIELAKILLKITPPSLDKIFYADSGSVAVEVALKMAVQYWTAQGQHQKTNFITTRSGYHGDTWNAMSVCDPVTGMHQIFGASLPNRVFVSAPKSRFDGEWDSSEMDEVEQLIQQHTQLAAFIIEPIVQGAGGMRFYHPEYLRQLKQLCEKYQLLLIFDEIATGFGRTGKLFAWEHAQVEPDIMCIGKGLTGGYMTLSATLTSQHVAEVISRGEAGVFMHGPTFMGNPLACAVALKSTQLLVEQDWQSNIRRIENRLQPLYQLAALAHVADIRTLGAIGVVELKHNVDMKTLQQQFVELGIWIRPFGKLVYVMPPYIISNDELDELIQKMMNVVRQLSCEAQHGIA

SEQ ID NO: 11090 - protein, 450 aa, Triticum aestivum
MSTCAASLAPLLGTAAANATDYLCNQFADTTTAIDSTYLLFSAYLVFAMQLGFAMLCAGSVRAKNTMNIMLTNVLDAAAGALFYYLFGFAFAFGTPSNGFIGKHFFGLRDVPQVGFDYSFFLFQWAFAIAAAGITSGSIAERTQFVAYLIYSAFLTGFVYPVVSHWIWSADGWASASRTSGPLLFNSGVIDFAGSGVVHMVGGVAGLWGALIEGPRIGRFDHAGRAVALRGHSASLVVLGTFLLWFGWYGFNPGSFLTILKSYGPPGSIHGQWSAVGRAAVTTTLAGSTAALTTLFGKRLQTGHWNVLDVCNGLLGGFAAVTAGCSVVDPWAAIICGFVSAWVLIGLNKLAARFKFDDPLEAAQLHGGCGAWGVIFTALFARREYVEQIYGAPGRPYGLFMGGGGRLLGAHVVLILVIAAWVSCTMGPLFLALNKLGLLRISAEDQMAGM

SEQ ID NO: 11091 - protein, 258 aa, Triticum aestivum
MSATCAADLAPLLGAAAMNATDYLCNRFADTTSAVDSTYLLFSAYLVFAMQLGFAMLCAGSVRAKNTMNIMLTNVLDAAAGALFYYLFGFAFAFGTPSNGFIGKHFFGLKDMPQTGFDYSFFLFQWAFAIAAAGITSGSIAERTQFVAYLIYSAFLTGFVYPVVSHWIWSVDGWASAARTSGPLLFKSGVIDFAGSGVVHMVGGIAGFWGALIEGPRIGRFDHAGRSVALKGHSASLVVLGTSCSGSAGTVQPGSFVT

SEQ ID NO: 11092 - protein, 346 aa, Corynebacterium efficiens YS-314
MGAMRIATLTSGGDCPGLNAVIRGIVRTASNEFGSTVVGYQDGWEGLLADRRVQLYDDEDIDRILLRGGTILGTGRLHPDKFRAGIDQVKANLADAGIDALIPIGGEGTLKGAKWLADNGIPVVGVPKTIDNDVNGTDFTFGFDSAVSVATDAIDRLHTTAESHNRVMIVEVMGRHVGWIALHAGMAGGAHYTVIPEVPFDISEICKRMERRFQMGEKYGIIVVAEGALPKEGTMELREGEVDQFGHKTFTGIGQQIADEVHRRLGHDVRTTVLGHIQRGGTPTAFDRVLATRYGVRAARACHEGQFNTVVALKGERIRMISFDEAVGTLKKVPMERWVTAQAMFG

SEQ ID NO: 11093 - protein, 191 aa, Nicotiana tabacum
MTFAGTTQKCSACEKTVYLVDRLAADNRIYHKACFRCYHCKSTLKLSNFNSFEGVIYCRPHFDQLFKRTGSLDKSFEGTPKVTKPEKPVDNENGSGSKVSSLFAGTREKCVGCTKTVYPIEKVSVNGTAYHKACFKCSHGGCTISPSNYIAHEGRLYCKHHHIQLFKEKGNYSQLESDHETDPALSTQSLT

SEQ ID NO: 11094 - protein, 406 aa, Ralstonia metallidurans CH34
MLSAASRPYIDASVPVLREHGLAITTHFYREMFAARPELKRIFNMGNQANGSQQQSLASAVFAYAANIDRADVLAPVVERIVHKHVAVGLTPAHYPIVGKYLLEAIAAVLGDAATPPLLAAWDEAYWLLAGELIAAEARLYERHGVAAGELLRVRVVNREQEGDQVVALTLAAEDGSPLRDFAPGQYISVEASFADGRRQLRQYSLSGERGLPTWRISVKREDGASDAPAGTVSNWLHENAQVGTTLHVSTPWGDFAPELDSRQPIVLMSAGIGVTPMVSVLRTLAHENPHRPVLFAHAARHGRQHAHRRDLAWARERMPNLRTHVSYETPQSVDASGRDYDHAGTMPVEALLKSGDNAAFNDARFYLCGPLGFMQEQRRALIASGVPVGHIHREVFGPDLLDDIL

SEQ ID NO: 11095 - protein, 504 aa, Sinorhizobium meliloti
MVMTVVVRPKALGDYDTREFRMLIDGQWVDGAEGRTIERVAPGHGVVVSRYQAAAKADAERAIAAARRAFDEGPWPRMTASERSLILLRAADMIAARADELAFLDAVESGKPISQAKGELAGAADIWRYAAALARELSGESYNTLGEGTLGVVLREPIGVVSIITPWNFPFLIVSQKLPFALAAGCTTVVKPSELTSASTLVLGEILEAAGVPQGVVNIIVGTGPEAGAPLTTHPHVDMVSFTGSTGIGQLTMANAAQTLKKVSLELGGKNPQIVFPDANLDEFIDAAVFGAYFNAGECCNAGSRLILHRDIAEEVTARIASLSAKVKVGDPLDPETQVGAIITPQHLQKIAGYVSSASNEGARIAHGGTTLDLGMGQFMAPTILSAVRPEMAVAREEVFGPVLSVLTFEKTEEAIRIANSIDYGLSAGVWSRDFDTCLTIGRRVRAGTVWMNTFMDGASELPFGGYRQSGLGRELGRHAVEDYTETKTLNMHIGRRSNWWMPR

SEQ ID NO: 11096 - protein, 286 aa, Burkholderia cepacia
MDASEFSKFLKAALPAQAIAGAALTVAEVEIPGYAQDIVLRLYRRPDKTGLPVVLYFHGGGFVRGSLEDADFAARFLAERLPALVVSVDYSLAPAFPFPAAPEDAYRAAVWAATRARAFGGNPKKIGVAGHDAGGQLANCLAFIARDRGEVSIAAQALFGPMLDPSMTRIGDAERLASDITARECAACYRAYLPQAAQRMHPYAAPIESVRLAGLPPTLVVTAQNDVLHVEAENYAGCLISSGVLTQVIRYPDITHAALATHEAAFEEAVRFFQCRFQARQPNRPE

SEQ ID NO: 11097 - protein, 367 aa, Arabidopsis thaliana
MGHLIPQTGDEETELGLAAVRLANCAAFPMVFKAAIELGVIDTLYLAARDDVTGSSSFLTPSEIAIRLPTKPSNPEAPALLDRILRLLASYSMVKCQIIDGNRVYKAEPICRYFLKDNVDEELGTLASQLIVTLDTVFLNTWGELKNVVLEGGVAFGRANGGLKLFDYISKDERLSKLFNRTGFSVAVLKKILQVYSGFEGVNVLVDVGGGVGDTLGFVTSKYPNIKGINFDLTCALTQAPSYPNVEHVAGDMFVDVPKGDAILLKRILHDWTDEDCEKILKNCWKALPENGKVIVMEVVTPDEADNRDVISNIAFDMDLLMLTQLSGGKERSRAEYVAMAANSGFPRCNFVCSAYHLWVIELTKQA

SEQ ID NO: 11098 - protein, 442 aa, Arabidopsis thaliana
MVDSDPVEFPPENRRGQLFGKYEVGKLVGCGAFAKVYHGRSTATGQSVAIKVVSKQRLQKGGLNGNIQREIAIMHRLRHPSIVRLFEVLATKSKIFFVMEFAKGGELFAKVSKGRFCEDLSRRYFQQLISAVGYCHSRGIFHRDLKPENLLLDEKLDLKISDFGLSALTDQIRPDGLLHTLCGTPAYVAPEVLAKKGYDGAKIDIWSCGIILFVLNAGYLPFNDHNLMVMYRKIYKGEFRIPKWTSPDLRRLLTRLLDTNPQTRITIEEIIHDPWFKQGYDDRMSKFHLEDSDMKLPADETDSEMGARRMNAFDIISGSPGFNLSGLFGDARKYDRVERFVSAWTAERVVERLEEIVSAENLTVAKKETWGMKIEGQKGNFAMVVEINQLTDELVMIEVRKRQRAAASGRDLWTDTLRPFFVELVHESDQTDPEPTQVHTTS

SEQ ID NO: 11099 - protein, 468 aa, Pasteurella multocida subsp. multocida str. Pm70
MKSRMLGDYNKLFRLCKYLREFTPVERAIHNRGETMNEQQLLECDRQHIWHPYAALNADFPLFVVERAEGVYIQLKNGQQLIDGMSSWWSAIHGYNHPRLNHAATQQLSQMSHVMFGGLTHQPAVELAQQLVNILPESLDKIFFADSGSVAVEVAMKMAVQYQHAKGETQRCKFATIRSGYHGDTWHAMSVCDPVTGMHSLFAKGLPVQYFLPQPPVKFGQAWQPEAMQPLQDLLAQHGDEIAGLILEPVVQGAGGMYFYSPEYLVQAKALCEQYGILLIFDEIATGFGRTGKLFACEHANVVPDVMCIGKALTGGYLTLSATITNQTVADVICSGEAKCFMHGPTFMANPLACAVAAESIKLLLASPWQQRIQQIEQQLRQELRQAEALDCVAEVRVLGAIGVIEMKAPVNMASLQPRFVQNGVWVRPFGKLVYLMPPYIISSDQLSQLIHGTIRTLQEEYAHKESL

SEQ ID NO: 11100 - protein, 413 aa, Magnetospirillum magnetotacticum MS-1
MPTPLSARTIAVVKATIPALETHGLTITRRMYERLFQNTDIRDLFNQSHHGETGSQPKALALAVLAYARNIDNLGVLTGAVERIAQKHVALNILPEHYSFVADALIGAIQDVLGEAATPEIVEAWGEAYWFLAELLIGREATIYRDLASKSGGWNGWRDFVVESVTPESEIIRSFVLVPADGGPVLRHEPGQYLGFLLDLPGRGVLKRNYSISCAPNDRAYRITVKREAKTEHPAGLVSNWLHDAAIAGTVLKVAAPAGDFFLDRSSNAPVVLVSGGVGLTPMVSMLESITETTPERPTWFVHSALNGRVHALREHVRNLAANRDNLRVRIFYTAPEAQDRVGEAYDIPGPVTAEWLVANTPSEQATYYLCGPKSFLASLANGLVRAGIPAERVRFEFFGPADALLEEPKQAA

SEQ ID NO: 11101 - protein, 196 aa, Triticum aestivum
  unsure (1)..(196): unsure at all Xaa locations
MHPTRWELSHMVDLQAAGLVISVVAAEVDSGGSSEMSDTDEHHFESKADSGASKTYPQQAGAIRKGGHIVIKARPCKVVEVSTSKTGKHGHAKCHFVAIDIFNGKKLEDIVPSSHNCDVPHVDRQDYQLIDITDDGYVGLLTESGNTKDDLKLPTDDVLLGQIKTGFADGKDLILSVMSAMGEEQICAVKXIGGGK

SEQ ID NO: 11102 - protein, 502 aa, Ralstonia solanacearum
MAQLLTVSEYAAMAGKLALPTQAFIDGAFVPAVSGKTFQTTNPATGNVLAEIAACDTRDVDIAVAKAKAAFEDGRWHRRSPAQRKATLLRLADLLEQHAHELAVMESLDSGKPIRECQATDVPETIHTIRWHAELIDKIYDSTAPVGSNALSLVVREPIGVVGLVLPWNFPLLMLAWKIGPSLAAGCSIIVKPAKETSLTALRVAELAHEAGVPAGVFNVLPGGGKEVGEPLGRHMDVSMVSFTGSTDTGRLFLKYAADSNLKRIVLECGGKNPAVVMNDVDDLDAVAQHVVNGAFWNMGENCSASSRLIVHADVKDALLARIGVHMREWKMGNPLDPEHRVGSLVSESHFRKVRSYLEHAGAEQLRVAFGGGTEGGIFVEPTVVDGVGQGSLLFREEIFGPILSVTTFTRMEDAIALANDSVYGLAASVYTDSLNNAIRLSREIRAGVVTVNCFGEGDVTTPFGGYKESGFGGRDKSIWAHDQYTEIKTIWIDVPDCTAAK

SEQ ID NO: 11103 - protein, 129 aa, Corynebacterium diphtheriae NCTC 13129
MPQGKVLWYDVDKGFGFVSNPEGDDCFVSKDVLPQGVQKLEKGQRVEFDYVARGRGPQALRIKVLDTPRLRRPAQHKYSAEELNSMISDLATLLEIKVQPSLRAGRYPDRKEGRQVANILRAVAKELDM

SEQ ID NO: 11104 - protein, 113 aa, Rickettsia sp. Hj126
ANEAVINMLKEIGSSEYIPKYIAKAKDKNDPFRLMGFGHRVYKNYDPRAAVLKETCKEVLKELGQLDNNPLLQIAIELEAIALKDEYFIERKLYPNVDFYSGIIYNAMGIPTQ

SEQ ID NO: 11105 - protein, 319 aa, Clostridium acetobutylicum ATCC 824
MKTIAVLTSGGDAPGMNAAIRAVVRTAIEKGINVKGIQRGYSGLINGEIFDMNRHSVSDIIQRGGTILRTARCPEFLKEEVRQKAANVLRVFGIDGLVVIGGNGSFMGAQKLSKLGVKTVGLPGTIDNDLPYTDYTIGFDTTLNTVLDAINKLRDTSTSHERVSIIEVMGRDCGDIALFSGIAGGAESVIIPEIGYDFNELCKNILEGKLRGKMHNLIILAEGVGGAAELAKKVEEVTGIETRSTILGHIQRGGSPSAFDRMLASRMGVKAVEVLMEGKTSRVIGIKEGKIMDQDIDEALAVPRSFNKELYDIANMLSK

SEQ ID NO: 11106 - protein, 370 aa, Sinorhizobium meliloti
MTVRNLFLLPGDGIGPEAMAEVRKIIAYMNAERDAGFVTDEGLVGGSAYDAHGAAISEGDMAKALAADAVLFGAVGGPKWDAVPYEVRPEAGLLRLRKDLELFANLRPAICYPALANASSLKPELVEGLDILIVRELTGGVYFGEPKEIVDLGNGQKRGIDTQVYDTYEIERIAGVAFELARTRNNRVCSMEKRNVMKSGVLWNQVVTETHKAKYSDVQLEHMLADAGGMQLVRQPKQFDVIVTDNLFGDMLSDVAAMLTGSLGMLPSASLGAPDAKTGKRKALYEPVHGSAPDIAGTGVANPIAMIASFAMCLRYSFNLVKEADDLEKAIANVLDQGIRTGDIMAEGCRKVGTAEMGDAILAEFKSLSA

SEQ ID NO: 11107 - protein, 140 aa, Triticum aestivum
  unsure (1)..(140): unsure at all Xaa locations
MAPTVMASSATSVAPFQGLKSTAGLPISRRSSSAGLSSVSNGGRIRCMQVWPIEGIKKFETLSYLPPLSTEALLKQVDYLIRSKWVPCLEFSKVGIVFREHNSSPGYYDGRYWTMWXLPMFGCTDATQXLNEVEEARRST

SEQ ID NO: 11108 - protein, 255 aa, Populus deltoides
MGRGRVQLKRIENNISRQVTFSKRRTGLLKKAHEISVLCDADVAVIVFSTKGKLFEYSTDSSMESILERYERCSYAEQQFVPHGPEHQGSWFLEHPKLRARVELLQRNLRNYTGQDLDPLSYKELHHLEQKIDTALKSVRSRKNQLVHESLAEMQKKEKALQDQNNILVEQVKKKLKALTEQAQWEQQNLGQNSSSFMLPQAQPPLQPSMLSHPPPTLGGSFQIRGFLNGNKDVEVQTQPSTMPHWMLRHVNDRI

SEQ ID NO: 11109 - protein, 424 aa, Clostridium acetobutylicum ATCC 824
MIIIKNGYVIDPLTKREGKFDILIDGENVVRISQDIGIDDDIEVIDAEDCIVSPGFIDIHSHFRDPGFTEKEDIITGARAAARGGYTTVICMANTNPVVDNVETLRYIVDKAKTAKIEVLQVGTITKGMQGVELVDMEALKEAGAVGFSDDGKPIMDSRLVLEAMQKARELDVPLSFHEEDPKLVYESGINGGKVAEKLNMMGALEEAETVLTARDAALAVSSGAKTNIQHISSKISLGIIKLAKEMGANIIAEATPQHFSITEEEILNCGTNAKVNPPLRREDDRKAIVAALKDDTIQVIATDHAPHTKDEKAREFKEAPSGMIGLETALSLAVTNLVKTGDLTYRDMISKLTINPARFYNLDRGYIKEGHRADIVIFDPDEKYTVKEEEFQSKASNSPFIGKELFGKVKTTIYNGKIVYEDK

SEQ ID NO: 11110 - protein, 168 aa, Zea mays
  unsure (1)..(168): unsure at all Xaa locations
MGMSLVNITNVAVLDNSSTFINPGQFGVSSECLVSIDGHLKXKLLYVGSVEDDISGHQLESGLVGPDNVGPXRCVLQTDPPDPSKLCEEYIFGASELLLHCTYMGQEFMTVECYLGHYYADVLLRXSLQRKVVIFGVQRTLVAXTKPQITKFHISIHLEAEYVGRDPA

SEQ ID NO: 11111 - protein, 360 aa, Triticum aestivum
MGSTAADMAASADEEACMYALQLVSSSILPMTLKNAIELGLLETLVAAGGKLLTPAEVAAKLPSTANPAAADMVDRMLRLLASYNVVSCTMEEGKDGRLSRRYGAAPVCKFLTPNEDGVSMAALALMNQDKVLMESWYYLKDAVLDGGIPFNKAYGMSAFEYHGTDPRFNRVFNEGMKNHSIIITKKLLEVYKGFEGLGTIVDVGGGVGATVGAIVAAYPAIKGINFDLPHVISEAPPFPGVTHVGGDMFQKVPSGDAILMKWILHDWSDEHCATLLKNCYDALPAHGKVVLVECILPVNPEATPKAQGVFHVDMIMLAHNPGGRERYEREFEALAKGAGFKAIKTTYIYANAFAIEFTK

SEQ ID NO: 11112 - protein, 454 aa, Arabidopsis thaliana
MNEDRISDLPDALLLQILSSLPTENAIATSVLSKRWRSLWTMLPKLKFDSNFNPVFDDDNIDPTMFSENVYKTLSLHKAPVLESLHLSFEGRTDCLHVGIWIATAFARGVRKLVLDSFYQEDQTVTLPSVLFSYNDSLEILKLKCAIDLDFPSRVCLKSLRKLYLDQVHFKDEESVCNLLCGCPSLQDLVVHRYSNADVATFTIASPSLQRLTIEDLRQEGGYGNGSYVINAPGLKYLNINGVIDIESCLIDKALELEEAKISNVSGITNENILESLTSAKRLILHLSPLEVKVPTGKIFDQLGCLELLTHEREWWNLLSIMLDSSPKLQILKLTDVSNFTSCLFPQLHFQVYLHDNKTNPDERKWNPPKCAPECLLFHLETFLWIGYEWQRGDEKEVATYILENARRLKKATFSTKRIGREKLEDFEKRREMLNELAIVLWDSNSCHLVFEST

SEQ ID NO: 11113 - protein, 176 aa, Glycine max
ELEDMKKRLKEIEEEASALREMQAKVEKEMGAVQDSSGTSATQAEKEEVDARSIYVGNVDYACTPEEVQQHFQSCGTVNRVTILTDKFGQPKGFAYVEFVEIDAVQNALLLNESELHGRQLKVSAKRTNVPGMKQYFGRRPAGFRSRRPFMSAPFFPPYGYGRVPRYRRPTRYRPY

SEQ ID NO: 11114 - protein, 157 aa, Triticum aestivum
GTRQPFPQQPQQPFPQPQLPFPQQSEQIIPQQPQQPFPLQPQQPFPQQPQQPFPQPQQPIPVQPQQSFPQQSQQSQQPFAQPQQLFPELQQPIPQQPQQPFPLQPQQPFPQQPQQPFPQQPQQSFPQQPQQPFPQQPQQPYPQQQPYGTSLTSIGGQ

SEQ ID NO: 11115 - protein, 177 aa, Dunaliella salina
SVAYKNVIGARRASWRIISSIEQKEESKGNEEHVQRIRSYRKMVEKELSDICSSILQLLDEHLIPTASTGESKVFYLKMKGDYHRYLAEFKTGSDRKEAAEHTLLAYKAAQDIALVDLPPTHPIRLGLALNFSVFYYEILNSPERACHLAKQAFDEAIAELDTLGEESYKDSTLIMQ

SEQ ID NO: 11116 - protein, 497 aa, Pseudomonas saccharophila
MKNQVQLITYVDRLGGQRDGADLARLKKLLCEPGQPLADVFGGVHLLPFFHAIDGADAGFDPIDHTLVDPRLGDWSDIKALTEGLEVMGDVIVNHMSSESPQFQDFSAKGRESAYDGLFLTLDAVFPNGATERDLLTVYRPRPGPAAELCDAEERRARILWTTFTAAQIDIAVHHPQGRAYLESILQTFAANGIRMVRLDAVGYAIKKAGASCFMMPETFGFIAEFAQAARALGIEVLVEIHAYYQRQIEIASQVDWVYDFALPPLVLHAFEFKTAGALKRWIAVRPTNALTVLDTHDGIGIIDIGADASDRAAHPGLVPPEELDALVERIHAASQGQSRKPTGAAASNLDLYQVNCSFFDAMGRNETAYLLARAIQFFLPGVPQVYYVGLLAGHNDMELLARTQVGRDINRHYYDAAEIASDCERPVVRRLIELIRLRNRHPAFGGVFSVEAGGDDELHLRWQQGGDWGPLRVNFASLDHELSCSRRRRDRAFAFS

SEQ ID NO: 11117 - protein, 149 aa, Glycine max
MEPMDIVGKAKEDASLPKATMTKIIKEMLPPDVRVARDAQDLLIECCVEFINLVSSESNEVCNKEERRTIAPEHVLKALGVLGFGEYIEEVYAAYEQHKLETMQDSLKGAKWSNRAEMTEEEALAEQQRMFAEARARMNGGAITSKQPD

SEQ ID NO: 11118 - protein, 214 aa, Zea mays
MAAVEVCVKAATGKPDTLGDCPFSQRVLLTLEEKKVPYEVKLVDLDNKPEWFLKISPEGKVPVFNGGDGKCIADSDVITQTIEEKFPTPSLVTPVEYASVGSKIFPAFITFLKSKDASDGSEKALLDELQALDEHLKAHGPYINGENVSAADLSMGPKLFHLQVALEHFKGWKIPENLTNVHAYTKAFFSRESFVKTKPSEEHVIAGWAPKVNA

SEQ ID NO: 11119 - protein, 181 aa, Arabidopsis thaliana
MSQLGVETSQAQPETPQSTTFLDLLRLQMDGLDRSRRRKRTLKERLGFKRIGCCGPTWGLRLTSNTGEDDDEPFENRLVSGSDHVTGPLNQGMNLATALAAERNYRTEETEASGSLTPLKVSLMRLLEETAERVVVEENETERVTASASSTVRGVNNDSVWLNRGSCPLCNRPIIEILDIY

SEQ ID NO: 11120 - protein, 506 aa, Oleomonas sagaranensis
MIHQTIEEISKSIAFRSRYDNFIGGKWVAPVRGQYFDNITPITGMPVAQIARSTAEDIELALDAAHAAKDAWGRTSVAERARLLNKIADRMEEKLDLLAMVETIDNGKPIRETKAADLPLAIDHFRYFASCVRAQEGSIGEVDHDTMAYHFHEPLGVVGHIIPWNFPLLMACWKLAPALAAGNCVVLKPAEQTPLSIMVWADLIGDILPPGVLNIVNGFGIEAGKPLASNKRIAKIAFTGETTTGRLIMQYASENLIPVTLELGGKSPNIFHEDVAAEDDDYFDKAIEGFVLFALNQGEVCTCPSRAIIHEKIYDKFMERALARVAAIKQGSPLEAATMLGAQASNDQLEKILSYIDIGKAEGAELLIGGERNILGGELAGGYYVKPTVFRGNNKMRIFQEEIFGPVVSVTTFKDEAEALSIANDTLYGLGAGVWTRDGNRAYRFGRAIQAGRVWTNCYHLYPAHAAFGGYKQSGIGRETHKMMLDHYQQTKNLLVSYSPKALGFF

SEQ ID NO: 11121 - protein, 447 aa, Chlorobium tepidum TLS
MSDSDHRNSLTIIDNRTGKSYELPIENGTIRTMDLRKIKESEDDFGLLGYDPAFLNTCSCKSTITFIDGDKGILRYRGYPIEQLAEKSSFLETAYLLIKGELPDKERLAVWTYNIRHHTMTHANLTKFMDGFRYDAHPMGILVGTLGALSTFYPDAKNVGEEESRKLQVRRLIGKMPTLAAMSFRHSLGFPYVLPDNDLSYAGNFLSMMFRMTEKNYKPNPVLEHALDVLFILHADHEQNCSTNAVRSVSSSMVDPYSAIAAGCAALYGPLHGGANEAVIHMLKQIGSVDKIPEFIKLVKSGEGRLMGFGHRVYKNYDPRARIIKKIAFDVFEETGRNPLLDIAIELERIALEDDYFIQRKLYPNVDFYSGLIYQAMGFPTEMFPVLFAIGRTPGWLAQWIEHVKDPEQKIARPRQIYLGEKCRDYVPIDERPRKGDDEQKFGICRL

SEQ ID NO: 11122 - protein, 316 aa, Escherichia coli
TDKLTSLRQYTTVVADTGDIAAMKLYQPQDATTAPSLILNAAQIPEYRKLIDDAVAWAKQQSNDRAQQIVDATDKLAVNIGLEILKLVPGRISTEVDARLSYDTEASIAKAKRLIKLYNDAGISNDRILIKLASTWQGIRAAEQLEKEGINCNLTLLFSFAQARACAEAGVFLISPFVGRILDWYKANTDKKEYAPAEDPGVVSVSEIYQYYKEHGYETVVMGASFRNIGEILELAGCDRLTIAPALLKELAESEGAIERKLSYTGEVKARPARITESEFLWQHNQDPMAVDKLAEGIRKFAIDQEKLEKMIGDLL

SEQ ID NO: 11123 - protein, 464 aa, Burkholderia cepacia R1808
MKQSIDALLRADRAHFMHPSTHAYDHESGALPGRIVRGAHGIHIEDHEGRRYIDAFAGLYCVNIGYGRTEVADAMHEQAKQLAYYHTYVGHASDAIIELSSRIIECAPVGMKKVYYGMSGSDANETQVKLVWYYNNVLGRPNKKKIISRERGYHGSGIVTGSLTGLPSFHQHFDLPIDRVKHTVCPHWYRNAPVGMSEAQFVAYCVDELEKLIAREGADTIAAFIAEPVMGTGGIIAPPAGYWPAIQAVLRQHDILLISDEVVCGFGRLGSKMGAQHFGIEPDLITVAKGLTSAYAPLSGVIVGDKVWDVIARGSQAHGPMGHGWTYSGHPVCAAAALANLAILERENLVGNAAEVGAYFGAKLRDAFGAHPLVGEVRSVGMLAALEFMADRDARTPFDPALKIGAQVSAAALRRGVIARAMPHGDILGFAPPLVMTRAEADEIVGIVKEAVDEVAERNLAAVS

SEQ ID NO: 11124 - protein, 316 aa, Escherichia coli
TDKLTSLRQYTTVVADTGDIAAMKLYQPQDATTNPSLILNAAQIPEYRKLIDDAVAWAKQQSNDRAQQIVDATDKLAVNIGLEILKLVPGRISTAVDARLSYDTEASIAKAKRLIKLYNDAGISNDRILIKLASTWQGIRAAEQLEKEGINCNLTLLFSFAQARACAEAGVFLISPFVGRILDWYKANTDKKEYAPAEDPGVVSVSEIYQYYKEHGYETVVMGASFRNIGEILELAGCDRLTIAPALLKELAESEGAIERKLSYTGEVKARPARITESEFLWQHNQDPMAVDKLAEGIRKFAIDQEKLEKMIGDLL

SEQ ID NO: 11125 - protein, 435 aa, Corynebacterium diphtheriae NCTC 13129
MKGMLVATENKDKAVLHYPGGEYEMDIIHATEGNDGVVLDKLLSQTGMVTFDPGYVSTGSTESKITYIDGDNGILRHRGYDIADLAENATFNEVSYLLIKGHLPTVDELHKFNNEIRHHTLLDEDFKSQFNIFPRDAHPMSVLASSVNILSTYYQDQLNPLDEEQLDKATVRLLAKVPMLAAYAYRASKGAPYMYPDNSLNARENFLRMMFGYPTEPYEVDPVVAKALDKLLILHADHEQNCSTSTVRMIGSAQANMFVAVAGGINALSGPLHGGANQAVLEMLEEIKANGGDATDFMNRVKNKEKGVRLMGFGHRVYKNYDPRAAIVKETAHEILEHLGGDELLDLAMKLEEIALSDDYFVSRKLYPNVDFYTGLIYRAMGFPTDFFTVLFAIGRLPGWIAQYREQLATTTKINRPRQIYTGETLRKVTPREQR

SEQ ID NO: 11126 - protein, 492 aa, Burkholderia cepacia R1808
MLPGHPVLFKSMCYVDGRWIHSDSAATRAVVNPADQSVIGHVPMLERAQIVGAVDAAQRAFGTWRWTPQAARSAALLRWHALILRHLDDLAALLSLEQGKPLAEARGEIRYAASFVEWFANEAKRAVGRTIPTHIDGAHLGTVMEPVGVAALITPWNFPAAMITRKAAAALAVGCTVIVKPAHETPFSALALAQLADEAGFPAGVFNVVLGEPQMAMEALVGDARVRAVSFTGSTRVGRLVTETAAKAGIRKIALELGGNAPFIVTDDADLDDAVRIAVGAKFQTSGQDCCAANRIFVARALYDAFVGRYASAVRALKTGPAFEPGVDVGPLMHQAAFDATVARVDDARARGARIVAGGRPHALGGWFYEPTVIADAAPGMRVYDEENFAPISAVCAFDTLDEVVARANDTEYGLAAYVCATRIDTIFRLVRRLDFAMVSVNGVKFTGAPIPFGGMKASGLGREGGVEGFEPFTETKYFCFGNLGLPVAATA

SEQ ID NO: 11127 - protein, 221 aa, Zea mays
  unsure (1)..(221): unsure at all Xaa locations
MARRAASSLVSRCLLARAPAGAPPAAPSAPRRTDGMHRLLPGVLQRFSTAAAVEEPITPSVHVNYTKLLINGNFVDSASGKTFPTLDPRTGEVIAHVAEGDAEDINRAVAAARKAFDEGPWPKMTAYERSRILLRFADLIEKHNDELAALETWDNGKPYEQAAQIEVPMVARLMRYYAGWADKIHGLIVPADGPHHVQILHEPXGVAGQIIPWNFPLLMYG

SEQ ID NO: 11128 - protein, 579 aa, Glycine max
MCGILAVLGCSDSSQAKRVRVLELSRRLKHRGPDWSGLHQYGDNYLAHQRLAIVDPASGDQPLFNEDKTVVVTVNGEIYNHEELRKQLPNHTFRTGSDCDVIAHLYEEHGENFMDMLDGIFSFVLLDTRDNSFIVARDAIGVTSLYIGWGLDGSVWISSELKGLNDDCEHFESFPPGHLYSSKERAFRRWYNPPWFSEAIPSAPYDPLALRHAFEKAVVKRLMTDVPFGVLLSGGLDSSLVAAVTARYLAGTKAAKQWGTKLHSFCVGLEGAPDLKAAKEVAEYIGTVHHEFHYTVQDGIDAIEDVIYHIETYDVTTIRASIPMFLMSRKIKSLGVKMVISGEGSDEIFGGYLYFHKAPNKEEFHQETCRKIKALHKYDCLRANKSTFAWGLEARVPFLDKEFIRVAMNIDPECKMIKKEEGRIEKWALRRAFDDEEHPYLPKHILYRQKEQFSDGVGYGWIDGLKAHAEKHVTDRMMLNAANIFPFNTPTTKEAYHYRMIFERFFPQNSARLTVPGGPSVACSTAKAVEWDAAWSNNLDPSGRAALGVHASAYGNQVKAVEPEKIIPKMEVSPLGVAI

SEQ ID NO: 11129 - protein, 316 aa, Escherichia coli
TDKLTSLRQYTTVVAATGDIAAMKLYQPQDATTNPSLILNAAQIPEYRKLIDDAVAWAKQQSNDRAQQIVDATDKLAVNIGLEILKLVPGRISTEVDARLSYDTEASIAKAKRLIKLYNDAGISNDRILIKLASTWQGIRAAEQLEKEGINCNLTLLFSFAQARACAEAGVFLISPFVGRILDWYKANTDKKEYAPAEDPGVVSVSEIYQYYKEHGYETVVMGASFRNIGEILELAGCDRLTIAPALLKELAESEGAIERKLSYTGEVKARPARITESEFLWQHNQDPMAVDKLAEGIRKFAIDQEKLEKMIGDLL

SEQ ID NO: 11130 - protein, 214 aa, Helianthus annuus
MKSFTGTTQKCTVCEKTVYLVDKLVANQRVYHKACFRCHHCNSTLKLSNFNSFDGVVYCRHHFDQLFKRTGSLEKSFDGTPKFKPERTFSQETQSANRLSSFFEGTRDKCNACAKIVYPIERVKVDGTAYHRACFKCCHGGCTISPSNYIAHEGRLYCKHHHIQLFKKKGNYSQLEVEETVAAPAESETQNAETQNAETQNADTQNTDTQNAAV

SEQ ID NO: 11131 - protein, 108 aa, Brassica rapa subsp. pekinensis
FVTFLKSIDSSDGSEKALLDELEALETHLKTHDGPFIAGGKVSAVDLSLAPKLYHLKVALGHYKSWSVPESLPHVHGYMKALFSLDSFEKTKTEERYVIAGWEHKVNP

SEQ ID NO: 11132 - protein, 316 aa, Escherichia coli
TDKLTSLRQYTTVVADTGDIAAMKLYQPQDATTNPSLILNAAQIPEYRKLIDDAVAWAKQQSNDRAQQIVDATDKLAVNIGLEILKLVPGRISTEVDARLSYDTEASIAKAKRLIKLYNDAGISNDRILIKLASTWQGIRAAEQLEKEGINCNLALLFSFAQARACAEAGVFLISPFVGRILDWYKANTDKKEYAPAEDPGVVSVSEIYQYYKEHGYETVVMGASFRNIGEILELAGCDRLTIAPALLKELAESEGAIERKLSYTGEVKARPARITESEFLWQHNQDPMAVDKLAEGIRKFAIDQEKLEKMIGDLL

SEQ ID NO: 11133 - protein, 290 aa, Corynebacterium diphtheriae NCTC 13129
MVTMKQHENIIPTITLNDGTEMPAIGFGTYKLREQDAYRAVRSAIEVGYRHIDTASLYKNEEEVGRAVADAITAGEVARDELFITTKVWNDMHGDQLTQRSFQESLHRLGLDYIDCCMVHWPWPQKGLYVESFAALAKIQGLGQLQSVAVANFYPEVLREIVAETGIAPVLNQVELHPGFSQAEQRAVDRELGVVTEAWSPLGRGDSLNAEAITLIAQCYEKTPAQVTLRWIHQLGCSVVPKSANPQRQRENLDIFDFELNTEDMNSITSLDEQGGRLFVDPHDFPGEVE

SEQ ID NO: 11134 - protein, 283 aa, Rhodospirillum rubrum
MTEWFSETLHPHWRQSFAADRVLLREQTAHQDLVILENQTFGRVMVLDGMVQLTERDEFVYHEMIAHVPLFGHGAARRVLIIGGGDGGTLREVLRHKTVERATMVEIDATVVEMARDHMPMVSDGAFDDPRAELIIADGIAFVAGAHQPYDVIIIDSTDPFGPAEGLFTPAFYGACRQLLTPGGVLVVQAGVPFLQPREIAHVNAALSAAFPEVAFYAIAVPTYVGGLMTLGWASEDAGKKVPDPAVLAARVAASGLAFGYYSPEGHAGAFALPPHIRAAARG

SEQ ID NO: 11135 - protein, 396 aa, Burkholderia cepacia R1808
MTLGFSEHRLAKVAAEQYSAFPGYHTFFGRNSKPTVELSERMLALAPVPMSRVFFTNSGSEANESVIKLLWMMWAAEGQPQRRKLLTRKNAYHGATVMASALTGKDYVKAFGLPTPDVITLDCPHAWRFAQAGESEEAFVKRLVSNLEKTILAEGPDTIAGMFAEPVMGAGGVIVPPAGYFEQVQAVLKKYQIPLVADEVICGFGRTGNLWGCQTVGLRPDIIVASKSMSAGYFPVGAVMLSAEIDRRATAASEQWEEFPHGFTTAGHPVACAVSLEAIRIITDEGILENVQKVGRKFQDGLRALADHPMVGDVRGVGLMGALEMVSDKSSKTSFSGELRVGERIAKAAREFGYIIRPLGASVVLAPPFITTSEQIDDLLTVLKRVLDSVYKDISG

SEQ ID NO: 11136 - protein, 175 aa, Oryza sativa
MAPSVMASSATTVAPFQGLKSTAGMPVARRSGNSSFGNVSNGGRIRCMQVWPIEGIKKFETLSYLPPLTVEDLLKQIEYLLRSKWVPCLEFSKVGFVYRENHRSPGYYDGRYWTMWKLPMFGCTDATQVLKELEEAKKAYPDAFVRIIGFDNVRQVQLISFIAYKPPGCEESGGN

SEQ ID NO: 11137 - protein, 188 aa, Helianthus annuus
MAFAGTTQKCMACDKTVYLVDKLTADNRVFHKACFRCHHCNGTLKLSNYNSFEGVLYCRPHFDQLFKKTGSLDKSFEGTPNIVKQPKTIDGEKPMANKVSSMFVGTKDKCLGCKNTVYPTEKVSVNGTAYHKSCFKCSHGGCTISPSNYIAHEGHLYCRHHHTQLIKEKGNLSQLEGERSARVGETAP

SEQ ID NO: 11138 - protein, 172 aa, Arabidopsis thaliana; identical to SEQ ID NO: 382

SEQ ID NO: 11139 - protein, 410 aa, Zea mays
  unsure (1)..(410): unsure at all Xaa locations
MASVSVVLLQRSSSRVRGYIRLQRIASSSVTLVLEGEGHWWWSNSRGRDERFGARTVHHMAGSGEGENGGVPAGGQVAMAPGVVTGGVEDAYGEDRATEDQTVTPWAVCIASGHSLLRDPRHNKGLSFTEKERDTHYLRGLLPPVVLSQDLQEKRMLQNVRQFQVPLQRYTALMDLQERNERLFYKLLIDNVEELLPVVYTPTVGEACQKYGSIFRRPQGLYISLKEKGRILEVLRNWTEKSIQVIVVTDGERILGLGDLGCQGMGIPVGKLALYTALGGVRPSAVSFNXCLPITIDVGTNNEDLLKDEFYIGLKQRRATGQEYSEFLDEFMAAVRQNYGQKVLVQFEDFANHNAFILLEKYRTNHLVFNDDIQGTAAVVLAGIIAALKSVGGTLADHTFLFFSASYTIK

SEQ ID NO: 11140 - protein, 181 aa, Oryza sativa (japonica cultivar-group)
MTEEQAVAEQQRMFAEARARMNNGAAKPKEPEPEAQQQTQQPPQPQLHPQPQQPLQPQLQLHPQPQQQPSQLHPQQLLHPQSQQTPQPQPQVHPQPQQPPQLQPQPQLLQQPQLPQQLQPQSQLPPQPQQPPQLQLQSQLHPQPQQPPQLQPQPQLHQQPQPQAELQSQSQPQTEHGLDSS

SEQ ID NO: 11141 - protein, 387 aa, Ceriporiopsis subvermispora
MAFTSLLALVALAAITRAAPTTICPDGTRVSNHVCCDFIPLAQALQSTLYMGDCGEDAHETIRLTFHDAIAISQSQGPSAGGGADGSMLIFPTVEPFFHANAGIDDSVNNLIPFLDKFPTITAGDLIQFAGTVALSNCPGAPQLEFLAGRPNATAPAVDGLIPEPQDNVTHILERFADAGGFTPFEVVSLLASHTVARADKVDLTIDAAPFDSTPFTFDTQIFLEVLLKGVGFPGTDNNTGEVESPLPLGNNKQGGNDTGEMRLQSDFALARDDRTACFWQGFVNEQEYMMSSFKAAMSKLAILGHNRNDLIDCSEVVPTPKPPVGKPASFPATTGPQDLQLTCKSERFPSLTIDHGAQETLIPHCSNGGQDCPTVQFTGPAGEDDS

SEQ ID NO: 11142 - protein, 392 aa, uncultured bacterium pCosFS1
MSVTDSDLEFDQRHIWHPYTSMSHPLPCYPVEAASGVELQLADGRRLIDGMSSWWAAIHGYNHPQLNLAATQQLEKMSHVMFGGITHPAANELCRKVVAMTPEALQCVFLADSGSVAVEVSLKMALQYWQARGERRQRILTLRHGYHGDTFGAMSVCDPDNSMHSLYQGYLAPHLFATAPQCGFDQAWDENDIAPFAALLEQHAGEVAAVILEPVVQGAGGMRIYHPTYLERVRELCDRYQVLLIADEIATGFGRTGKLFACEHAEVVPDILCLGKALTGGYMTLSATLTTRHVAETISNGAAGCFMHGPTFMGNPLACAVANASLSLLAENRWQQQVAAIETQLKQQLLPLKMQPKVADVRVLGAIGVVEMREPVDMAQLQRGFVERGVWI

SEQ ID NO: 11143 - protein, 430 aa, Glycine max
  unsure (1)..(430): unsure at all Xaa locations
MDPENQLTSNPRSIILNKYEMGRVLGQGNFAKVYHGRNLNTNEXVAIKVIKKEKLKKERLVKQIKREVSVMKLVRHPHIVELKEVMATKGKIFLVMEYVNGGELFAKVNNGKLTEDLARKYFQQLISAVDFCHSRGVTHRDLKPENLLLDQNEDLKVSDFGLSALPEQRRADGMLLTPCGTPAYVAPEVLKKKGYDGSKADIWSCGVILFALLCGYLPFQGENVMRIYRKAFRAEYEFPEWISTQAKNLISKLLVADPGKRYSIPDIMKDPWFQVGFMRPIAFSIKESNVVEDNEGKPARPFYNAFEIISSLSHGFDLRSLFETRKRSPSMFISKFSASTVLAKVEAVAKKLNFRVTGKKEFVVRMQGAEEGRKGKLAMTVEVFEVAPEVAVVEFSKSAGDTLEYVRFCDEQVRPSLKDIVWSWQGDTNS

SEQ ID NO: 11144 - protein, 261 aa, Guillardia theta
MNVKYINVWKYNVKDIFKEINNLCKDTCLISLDTEFPGIVLKIKSFKYSSENASYHMLRKNVNILKTIQIGLTFDKNCNFKFSTTFQFNFVYDFENNCFAQDSIDLLSKSKLLFETNNKIGINLDLFKEFLTSSSLLCNKKLKWITFHSGYDFGYLINLITNKELPLSKKDFIEHLNFYFPCFFDLKHLGYFSSNFYGSLDKIAEKFNINRIGKSHQAGSDSLITLNIYKIISNDIKPREYFRKFKCVLYNSPSVVHNYYL

SEQ ID NO: 11145 - protein, 509 aa, Agrobacterium tumefaciens str. C58
MDAMTKLDVKQEAAALLDKMGVARDLYTGGDMASFSPVTGEQIASLRTVSVEGVAAVVDKADAAFRTWRNVPAPRRGELIRLLGEELRAFKTDLGRLVSLEAGKIPSEGLGEVQEMIDICDFAVGLSRQLYGLTIATERPGHRMMETWHPLGVVGVISAFNFPVAVWSWNAALALVCGNSVVWKPSEKTPLTALAVQGIFERAAARFGDAPEGLSQLLIGDRAVGEAMVDYPKVPLVSATGSTRMGRDVGPRLAKRFARAILELGGNNAGIVCPSADLDMALRAIAFGAMGTAGQRCTTLRRLFVHDSVYEELVPRLKKAYASVSVGNPLESSALVGPLVDKAAFDGMQKAIEAAKAAGGVVHGGDRVDTGAADAYYVKPALVEMPKQVGPVLEETFAPILYVMKYSDLDQAIDAHNAVAAGLSSSIFTRDIQESERFLSSEGSDCGIANVNIGTSGAEIGGAFGGEKETGGGRESGSDSWKAYMRRATNTINYSKALPLAQGVSFDIE

SEQ ID NO: 11146 - protein, 634 aa, Zea mays
ISPKVSHFGVNPKARWRVRSYKVLLQCNASLPLVGADVSEVDDPLRVAPLVVVPGDDLDHVVAHDHGEGGVDGGGDVGAPEVDGHERHVADLEDARELVGRGVAERLVHLLGEGLLGDLHDEVDDGDVRGGHPERDPVELALKVGEHQRDGLGGTGGRQETDERLFYKLLIDNVVELLPFVYTPTVGEACQKYGSIFGRPQGLYVSLKDKGKVLEVLRNWPHRNIQVICVTDGERILGLGDLGCQGMGIPVGKLALYTALGGVDPSVCLPITIDVGTNNEKLLNDEFYIGLRQKRATGEEYDELIEEFMSAVKQFYGEKVLIQFEDFANHNAFDLLEKYSKSHLVFNDDIQGTASVVLAGLLAALKMVGGTLAEQTYLFLGAGEAGTGIAELIALEISKQTNAPIEECRKKVWLVDSKGLIVDSRKGSLQPFKKPWAHEHEPLKTLYDAVQSIKPTVLIGTSGVGRTFTKEIIEAMSSFNERPIIFSLSNPTSHSECTAEQAYTWSQGRSIFASGSPFAPVEYEGKTFVPGQSNNAYIFPGLGLGLVISGAVRVHEDMLLAASKALADQATQDNFEKGSIFPPFTSIRKISAHIAAAVAAKAYELGLATRLPPPSDLVKYAENCMYTPVYRNYR

SEQ ID NO: 11147 - protein, 333 aa, Deinococcus radiodurans
  unsure (1)..(333): unsure at all Xaa locations
MAKYRICLIEGDGIGHEVIPAAKRVLEAAGFDAEYVHAEAGYEYFLDHGTSVPEATYDAVENTDATLFGAATSPSGEKPAGFFGAIRHLRQKYNLYANVRPTKTRPVPHSYENVDLVIVRENTQGLYVEQERRYGDTAIADTVITREASDRIGKFAADLAMKRSKRLTVVHKSNVLPVTQGLFMNTILDHTKTVEGLSTSTMIVDNAAMQLVRNPQQFDVMVMTNMFGDILSDLAAGLVGGLGIAASGNVGDQFGIFESVHGSAPDIAGQGISNPTATILAAVIMLDHLGDHETARRLDNAINKVLAEXPRTRDLGGTAGTQEFTEAVIKALA

SEQ ID NO: 11148 - protein, 175 aa, Triticum aestivum
MAPTVMASSATSVAPFQGLKSTAGLPVSRRSNGASLGSVSNGGRIRCMQVWPIEGIKKFETLSYLPPLSTEALLKQVDYLIRSKWVPCLEFSKVGFIFREHNASPGYYDGRYWTMWKLPMFGCPDATQVINEVEEVKKEYPDAYVRIIGFDNMRQVQWVSFIAFKPPGCEESGKA

SEQ ID NO: 11149 - protein, 402 aa, Zea mays
TGRDEAAWDMDDVAGCFEYFTDQAEALDKRQNSPVSLPMETFKCHLRREPIGVVGLITPWNYPLLMATWKVAPALAAGCAAVLKPSELASVTCLELADICKEVGLPPGVLNIVTGLGPDAGAPLSAHPDVDKVAFTGSFETGKKIMAAAAPMVKPVTLELGGKSPIVVFDDVDIDKAVEWTLFGCFWTNGQICSATSRLLVHTKIAKEFNEKMVAWAKNIKVSDPLEEGCRLGPVVSEGQYEKIKKFILNAKSEGATILTGGVRPAHLEKGFFIEPTIITDITTSMEIWREEVFGPVLCVKEFSPEDEAIELANDTQYGLAGAVISGDRERCQRLSEEIDAGIIWVNCSQPCFCQAPWGGNKRSGFGRELGEGGIDNYLSVKQVTEYISDEPWGWYRSPSKL

SEQ ID NO: 11150 - protein, 427 aa, Zea mays
  unsure (1)..(427): unsure at all Xaa locations
RCRCCAQQERGRIMSKLADLVEQHTEELAALDGADAGKLLLLGKIIDIPAATQMLRYYAGAADKIHGDVLRVSGRYQGYTLKEPIGVVGVIIPWNFPTMMFFLKVSPALAAGCTVVVKPAEQTPLSALYYAHLAKMAGVPDGVINVVPGFGPTAGAALASHMDVDSVAFTGSTEVGRLIMESAARSNLKMVSLELGGKSPLIIFDDADVDMAVNLSRLAVFFNKGEVCVAGSRVYVQEGIYDEFVKKAVEAARSWKVGDPERIIXSVGRXVDKDQFERVLKYIEHGKSEGATLLTGGKPAADKGYYIEPTIFVDVTEDMKIAQEEIFGPVMSLMKFKTVDEVIEKANCTRYGLAAGIVTKSLDVANRVSRSVRAGTVWVNCYFAFDPDAPFGGYKMSGFGRDQGLAAMDKYLQVKSVITALPDSPWY

SEQ ID NO: 11151 - protein, 371 aa, Methanocaldococcus jannaschii
  unsure (1)..(371): unsure at all Xaa locations
MFISYWLLQNVFERHYIKKFLVLSMMKVCVIEGDGIGKEVIPEAXKILNELGEFEIIKGEAGLECLKKYGNALPEDTIEKAKEADIILFGAITSPKPGEVQNYKSPIITLRKMFHLYANVRPINNFGIGQLIGKIADYEFLNAKNIDIVIIRENTEDLYVGRERLENDTAIAERVITRKGSERIIRFAFEYAIKNNRKKVSCIHKANVLRITDGLFLEVFNEIKKHYNIEADDYLVDSTAMNLIKHPEKFDVIVTTNMFGDILSDEASALIGGLGLAPSANIGDDKALFEPVHGSAPDIAGKGIANPMASILSIAMLFDYIGEKEKGDLIREAVKYCLINKKVTPDLGGDLKTKDVGDEILNYIRKKLKGY

SEQ ID NO: 11152 - protein, 337 aa, Methanocaldococcus jannaschii
MVISMHKICVIEGDGIGKEVVPATIQVLEATGLPFEFVYAEAGDEVYKRTGKALPEETIETALDCDAVLFGAAGETAADVIVKLRHILDTYANIRPVKAYKGVKCLRPDIDYVIVRENTEGLYKGIEAEIDEGITIATRVITEKACERIFRFAFNLARERKKMGKEGKVTCAHKANVLKLTDGLFKKIFYKVAEEYDDIKAEDYYIDAMNMYIITKPQVFDVVVTSNLFGDILSDGAAGTVGGLGLAPSANIGDEHGLFEPVHGSAPDIAGKKIANPTATILSAVLMLRYLGEYEAADKVEKALEEVLALGLTTPDLGGNLNTFEMAEEVAKRVREE

SEQ ID NO: 11153 - protein, 154 aa, Zea mays
GRVGKFGSSFRFGLEAGSKPEILLAMSCLCKGSPDAFLVCNGFKDAEYISLALLGRKLALNTVIVLEQEEELDLVIELSQKMNVRPVIGLRAKLRTKHSGHFGSTSGEKGKFGLTTTQIVRVVRKLRQSGMLDCLQLLHFHIGSQIPSTSLLSD

SEQ ID NO: 11154 - protein, 336 aa, Mycobacterium avium subsp. paratuberculosis str. k10
MKLAVIGGDGIGPEVTAEALKVLDAVLPGVDKTEYDLGARRYHATGELLPDSVIDELRAHDAILLGAIGDPSVPSGVLERGLLLRLRFELDHHINLRPGRLYPGVSSPLAGNPDIDFVVVREGTEGPYTGTGGAIRVGTPNEVATEVSQNTAFGVRRVVVDAFERARRRRKHLTLVHKTNVLTFAGKLWSRIVAEVGRDYPDVEVAYQHIDAATIFMVTDPGRFDVIVTDNLFGDIITDLSAAVCGGIGLAASGNIDGTRTNPSMFEPVHGSAPDIAGQGIADPTAAIMSVALLLAHLGEDAAATRVDRAVERYLATRGNERPATTEVGERIAAAL

SEQ ID NO: 11155 - protein, 314 aa, Pseudomonas resinovorans
MPSLSLRIERIDPLTPRIRRLILVADAQQPLPGFTPGAHIEIQIAGSKPQWRAYSLVNLPGHAHYEIAVQLEEQSSGGSRWIHQLQVGQPLQVRAPKNHFPLVTQASDYLLIAGGIGITPMLGMARALAAGQQPFTLHYAGREAQGMAYLEEVRALGSAHCWISGGDPARRLPLASLLATPHNGRQLYVCGPKALIASVLHSARELGWDDSHVHSELFTGSLDAAGDASFEVELRSSGITLQVPAGKSVLEAMLDADLDPLFDCRRGDCGVCVAQVLEGSAEHRDICLSARERSDGRFCTCVSRASSARLVLDL

SEQ ID NO: 11156 - protein, 425 aa, Bacillus cereus ATCC 10987
MKNERIEKLQESWELDTRWKGITRPYSAEDVIRLRGSIDIEHTLARRGAEKLWASLHTEDYINALGALTGNQAMQQVKAGLKAIYLSGWQVAADANLSGHMYPDQSLYPANSVPAVVKRINQTLQRADQIQHMEGSGDTDYFVPIVADAEAGFGGQLNVFELMKGMIEAGASGVHFEDQLSSEKKCGHLGGKVLLPTQTAVRNLISARLAADVMGVPTIIVARTDADAADLITSDIDPVDKAFITGERTPEGFYRTKAGLDQAIARGLAYAPYADLVWCETSEPNLEDAKRFAEAIHKEHPGKLLAYNCSPSFNWKQKLDEKTIASFQKEIASYGYKFQFVTLAGFHSLNYGMFELARGYKERGMAAYSELQQAEFAAEKHGYSATRHQREVGTGYFDEVAQVITGGTSSTTALKGSTEEAQFTK

SEQ ID NO: 11157 - protein, 177 aa, Cicer arietinum
LDIAVRLLEPLKEQFPIISYADFYQLGGVVAVEVTGGPEVPFHPGREDKPEPPPEGRLPDATKGSDHLRDVFGKAMGLSDQDIVALSGGHTIGAAHKERSGFEGPWTSNPLIFDNSYFTELLNGEKEGLLKLPSDKALLSDPVFRPLVEKYAADEDAFFADYAEAHLKLSELGFAEA

SEQ ID NO: 11158 - protein, 141 aa, Arabidopsis thaliana
MADTPSSPAGDGGESGGSVREQDRYLPIANISRIMKKALPPNGKIGKDAKDTVQECVSEFISFITSEASDKCQKEKRKTVNGDDLLWAMATLGFEDYLEPLKIYLARYRELEGDNKGSGKSGDGSNRDAGGGVSGEEMPSW

SEQ ID NO: 11159 - protein, 316 aa, Escherichia coli
TDKLTSLRQYTTVVADTGDIAAMKLYQPQDATTNPSLILNAAQIPEYRKLIDDAVAWAKQQSNDRAQQIVDATDKLAVNIGLEILKLVPGRISTEVDARLSYDTEASIAKAKRLIKLYNDAGISNDRILIKLASTWQGIRAAEQLEKEGINCNLTLLFSFAQARACAEAGVFLIAPFVGRILDWYKANTDKKEYAPAEDPGVVSVSEIYQYYKEHGYETVVMGASFRNIGEILELAGCDRLTIAPALLKELAESEGAIERKLSYTGEVKARPARITESEFLWQHNQDPMAVDKLAEGIRKFAIDQEKLEKMIGDLL

SEQ ID NO: 11160 - protein, 411 aa, Haemophilus influenzae 86-028NP
  unsure (1)..(411): unsure at all Xaa locations
MSDPVILPLGIAAFTVIVLVLVAIILXAKSKLVDSGDITIDINDDPEKAITLPAGGKLLGALASKGIFVSSACGGGGSCGQCIVKVKNGGGEILPTELSHINKREAKEGYRLACQVNVKGNMEVELPEEIFGVKKWECTVISNDNKATFIKELKLAIPEGEEVPFRAGGYIQIEAEPHVVNYKDFDIPEEYHEDWDKYDLWRYVSKVDEHIIRAYSMASYPEEKGIIMLNVRIATPPPRQPDAPPGQMSSYIWSLKAGDKVTISGPFGEFFAKETNAEMVFIGGGAGMAPMRSHIFDQLKRLHSKRKMSFWYGARSKREIFYQEDFDQLQAENPNFVWHVALSDALPEDNWTGYTGFIHNVLYENYLKNHEAPEDCEYYMCGPPVMNAAVIKMLKDLGVEDENILLDDFGG

SEQ ID NO: 11161 - protein, 170 aa, Zea mays
MAPTVMMASSATAVAPFQGLKSTASLPVARRSSRSLGNVSNGGRIRCMQVWPAYGNKKFETLSYLPPLSTDDLLKQVDYLLRNGWIPCLEFSKVGFVYRENSTSPCYYDGRYWTMWKLPMFGCNDATQVYKELQEAIKSYPDAFHRVIGFDNIKQTQCVSFIAYKPPGSD

SEQ ID NO: 11162 - protein, 353 aa, Nicotiana tabacum
MEVISTNTNGSTIFKSGAIPMNGHHNGTSKHQNGHKNGTSEQQNGTISLDNGNELLGNSNCIKPGWFSEFSALWPGEAFSLKVEKLLFQGKSDYQDVMLFESATYGKVLTLDGAIQHTENGGFPYTEMIVHLPLGSIPNPKKVLIIGGGIGFTLFEMLRYPTIEKIDIVEIDDVVVDVSRKFFPYLAANFNDPRVTLVLGDGAAFVKAAQAEYYDAIIVDSSDPIGPAKDLFERPFFEAVAKALRPGGVVCTQAESIWLHMHIIKQIIANCRQVFKGSVNYAWTTVPTYPTGVIGYMLCSTEGPEIDFKNPVNPIDKETAQVKSKLAPLKFYNSDIHKAAFILPSFARSMIES

SEQ ID NO: 11163 - protein, 158 aa, Brassica rapa subsp. pekinensis
TMGISVKEFPWIKGFNFDVPHVVQVAQVLDGVENVGGDMFDSVPKCDAVLIKWVLHDWGDRDCIRILKNCKEAVPPNIGKVLIVESVIREKKKAMIVEDRDEKLEHVRLMLDMVMMAHTTTGKERTLKEWDFVLNEAGFARYEVRDIDDVQCVIIAYR

SEQ ID NO: 11164 - protein, 375 aa, Nicotiana tabacum
MEVISTNTNGSTIFKNGAIPMNGHQNGTSEHLNGYQNGTSKHQNGHQNGTFEHRNGHQNGTSEQQNGTISHDNGNELLGSSDSIKPGWFSEFSALWPGEAFSLKVEKLLFQGKSDYQDVMLFESATYGKVLTLDGAIQHTENGGFPYTEMIVHLPLGSIPNPKKVLIIGGGIGFTLFEMLRYPSIEKIDIVEIDDVVVDVSRKFFPYLAANFNDPRVTLVLGDGAAFVKAAQAGYYDAIIVDSSDPIGPAKDLFERPFFEAVAKALRPGGVVCTQAESIWLHMHIIKQIIANCRQVFKGSVNYAWTTVPTYPTGVIGYMLCSTEGPEVDFKNPVNPIDKETTQVKSKLGPLKFYNSDIHKAAFILPSFARSMIES

SEQ ID NO: 11165 - protein, 178 aa, Glycine max
MASSMISSPAVTTVNRAGAGMVAPFTGLKSMAGLPTRKTNNDITSIASNGGRVQCMQVWPPVGKKKFETLSYLPDLDDAQLAKEVEYLLRKGWIPCLEFELEHGFVYREHNRSLGYYDGRYWTMWKLPMFGCTDASQVLKELQEAKTAYPNGFIRIIGFDNVRQVQCISFIAYKPPSF

SEQ ID NO: 11166 - protein, 536 aa, Zea mays
MGNCCRSPAAVAREDVSSSHFPASNAKKKPHQARNGGGAGQKRLSVLGDEGCEVVGIDDKYVLDRELGRGEFGVTYLCMDRGTKELLACKSISKRKLRTAVDVEDVRREVAIMRHLPKSPSVVSLREACEDDGAVHLVMELCEGGELFDRIVARGHYTERAAASVTRTILEVVQLCHRHGVIHRDLKPENFLFANKKENSPLKAIDFGLSIFFKPGEKFSEIVGSPYYMAPEVLKRNYGPEIDIWSAGVILYILLCGVPPFWAETEQGVAQAILRGNIDFKREPWPNVSENAKDLVRHMLEPDPKLRLTAKQVLEHHWLQNAKKAPNVPLGDIVKSRLKQFSRMNRFKRRALRVIADHLSAEEVEDIKDMFKTMDTDNDGIVSYEELKTGIAKLGSHLAESEVQMLIEAVDTNGRGALDYGEFLAVSLHLQRMANDEHLRRAFLFFDKDGNGFIEPEELREALVDDGAADSMEEVVNDILQEVDTDKDGKISYEEFVAMMKTGTDWRKASRHYSRGRFNSLSMKLIKDGSVKLGVE

SEQ ID NO: 11167 - protein, 161 aa, Pseudomonas aeruginosa PAO1
MSDSLLSIPCTTIKGEQKTLADFGGKALLVVNTASKCGFTPQYQGLEALWEKYRERGLVVLGFPCNQFGKQEPGDEGEISQFCELNYGVSFPLFRKIEVNGAGAHPLFVSLKKRAPGLLGSQGIKWNFTKFLIGRDGQVVKRYAPTTKPEELSSAIEALLE

SEQ ID NO: 11168 - protein, 112 aa, uncultured Bartonella sp.
ANEACLKMLQEIGSVERIPEFIARAKDKNDSFRLMGFGHRVYKNYDPRAKIMQQTCHEVLKELNIQNDPLLDIAITLENIALNDEYFIEKKLYPNVDFYSGITLKALGFPTE

SEQ ID NO: 11169 - protein, 159 aa, Triticum aestivum
  unsure (1)..(159): unsure at all Xaa locations
MSDSEEHHFXSKADAGASKTYPQQAGTVRKNGFIVIKNRPCKXVEVSTSKXLGKHGHAKCHFVAIXHIPMGKKLEDIVPSSHNXDIPACXPLLNYQLIXIFPEDGFVTLLTXDGNTKDDLRXPTDEILXAQIKEGXKTGRSVVTSICMGEDKXAXEGFQ

SEQ ID NO: 11170 - protein, 202 aa, Arabidopsis thaliana
MTETHRTTTTFLDLLRRQMSGHDLTRRKRTLKERLRFKCIGCCGPTWNLRLTNNTTLHSPTSRDDEIEELQIETGLVLESDHGSGTGMNLATALEAERYNRGESTEAEADMTPRRVSLMRLLEETAEKIVDDDGKETEILTASIGTLTGNDSVCCVCMGRKKGAAFIPCGHTFCRVCSRELWLNRGSCPLCNRPIIEILDIF

SEQ ID NO: 11171 - protein, 322 aa, Neurospora crassa
MNSATSNFEVDATGVSPKQIHNLIPSLKLSDGNEIPMLGYGLGTANYKSGDSADTISEPIVNATLTALNAGYAHLDGAEVYGNEVELGRAIAQSKLPRSSLYITTKTIVRAGDTVTQSFNRSLEKLGLDYVDLYLLHSPFFAKNPEQLQAAWREMEKIKDSGMAKSIGVSNFLISHLQTLFDIPGGLQYPPVVNQIEYHPYLQHVVEGEDLVAFCREKHIAIAAYSPLTAITKARPGPVDPIYTQLAKKYGVSEAEIAFRWCLDQGIVTLTTSSNEERLKGYLKKLPSFKLTPKEVEDIASAGKEKHYRVWWTEEFAGDDRH

SEQ ID NO: 11172 - protein, 344 aa, Mesorhizobium sp. BNC1
MTNMMKALVKAKPEEGLWMERVPLPEIGPNDVLIKVRKAAICGTDVHIWNWDEWARKTVPVPLVTGHEFVGEVVDVGSAVTEYRIGQRVSGEGHIVCGHCRNCRAGRGHLCRNTLGVGVHRPGAFAEYISLPQHNVVAIPDDVPDEIAAIFDPLGNAVHTALSFDLVGEDVLVTGAGPIGIMGALVAQCVGARKVVITDINPGRLALAKKLGVRHVVNAREEKLTDVMRKLGMTEGFDVGLEMSGSASAFRDMIDVMNNGGKIAILGIAPTGFEIDWNKVIFKMLHLKGIYGREMFETWYKMIALVQGPLDISGLITHRISADDYREGFAAMRSGEAGKVVMDW

SEQ ID NO: 11173 - protein, 434 aa, Agrobacterium tumefaciens str. C58
MGERSMTDFYKLVPGAPKGRFDGIERTYTAADVARLRGSVEIRHSLAEMGANRLWKLINEENFVNALGALSGNQAMQMVRAGLKAIYLSGWQVAADANTASAMYPDQSLYPANAAPELAKRINRTLQRADQIETAEGKGLSVDTWFAPIVADAEAGFGGPLNAFEIMKAFIEAGAAGVHYEDQLASEKKCGHLGGKVLIPTAAHIRNLTAARLAADVMGVPTLVIARTDAEAAKLLTSDIDERDQPFVDYDAGRTVEGFYQVKNGLEPCIARAVAYAPYCDLIWCETSKPDLEQARRFAEGVHKVHPGKKLAYNCSPSFNWKKNLDDATIAKFQRELGAMGYKFQFITLAGFHQLNFGMFELARGYKDRQMAAYSELQEAEFAAEVNGYTATKHQREVGTGYFDAVSLAISGGTSSTTAMKESTEHDQFRPAAE

SEQ ID NO: 11174 - protein, 133 aa, Neurospora crassa
MNAPDRFELFLLQDGEKKIEEKVFTGMSNTSDFKILKEDHTLGNLLAEHLKQAPHVLMAGYKIAHPNVPELFIRIQTDGSITPREALVGACKQLVAMYGQLGREFQKELALRQYADQGEQGGGVNGGANGGHY

SEQ ID NO: 11175 - protein, 240 aa, Triticum aestivum
MGGGVMRTAAAAPLLSAAGEIPPVAPAGSQWASWEVDDWEFADWRSESASEADVAVVGGPRLVFAPPSREEAEEATAELREAIDRVYFKETPVEVVKEHDQELSKLGADALIPAMPGHVVQAFTLLKSSPEAQSVVASLASDKNVWDAVLKNERVMEFYKSHQQTLVNTFPEGTDSTDSVESPEKFEEASPEYALPTASPLSDFVDNAKKTMMEMVDNITNFFQRLFHNPAKLKPDRVIL

SEQ ID NO: 11176 - protein, 237 aa, Arabidopsis thaliana
MEGVGARLGRSSTRYGPATVFTGPVRKWKKKWVHVSPSSKKDNNNSSSGSAAAAASVVNGGSNSDGSNGSHLLLYKWAPLSQNGNGNEDGKSESNSPSEDTVATVAEDPPRRRFKYVPIAVLEEQKKEITEIEEDDKIEEDDKIDEDNKVEQEDKVDEDKTVEESSEKKAEVEVEEKPDINDVPMEDIQVEEKIVQDDEEKVVRQDLNESTVDLGLNLNANDADAENDPKEDKPLEE

SEQ ID NO: 11177 - protein, 129 aa, Brassica napus
  unsure (1)..(129): unsure at all Xaa locations
MIREIPSLQNDNVSIQDHTSSNIKNRNTMDMRRDNRQDMTFRGPTQDQMMSKQEYLQTLSSQNSTRRLITKSSYFSLESMVVLVGLXASLLFLPLILPPLPPPXPFMLLLVPIGIMVLLMVLALMPSSN

SEQ ID NO: 11178 - protein, 202 aa, Cicer arietinum
MNPEYDYLFKLLLIGDSGVGKSCLLLRFADDSYLDSYISTIGVDFKIRTVEQDGKTIKLQIWDTAGQERFRTITSSYYRGAHGIIVVYDVTDQESFNNVKQWLNEIDRYASENVNKLLVGNKCDLAANKVVSSETAKAFADEIGIPFMETSAKNATNVEQAFMAMAAEIKNRMASQPANNARPPTVQIRGQPMNQKSGCCST

SEQ ID NO: 11179 - protein, 280 aa, Pyrococcus horikoshii OT3
MRDMEFIEWYPRGYGVAFKVKRKILEEQSEYQKIEVYETEGFGKLLAIDGTVQLVTEGEKSYHEPLVHPAMLAHPNPRRVLIIGGGDGGAIREVLKHEEVEEVIMVEIDKKVIEISAKYIGIDGGILEKMLSDKHEKGKLIIGDGVKFIEENSGFDVIIVDSTDPVGPAEMLFSEEFYKNAYRALNDPGIYVTQAGSVYLFTDEFLTAYRKMRKVFDKVYYYSFPVIGYASPWAFLVGVKGSIDFMKVDAEKGKKLGLEYYDPDKHETLFQMPRYIVQML

SEQ ID NO: 11180 - protein, 197 aa, Cicer arietinum
MSGSRFIKCVTVGDGAVGKTCLLISYTSNTFPTDYVPTVFDNFSANVVVDGSTINLGLWDTAGQEDYNRLRPLSYRGADVFLLAFSLISRASYENIAKKWIPELRHYAPGVPIILVGTKLDLRDDKQFFQDHPGAVPITTAQGEELRKLIGAPVYIECSSKTQKNVKAVFDAAIKVVLQPPKQKKTKRKGQKACSIL

SEQ ID NO: 11181 - protein, 343 aa, Mycobacterium avium subsp. paratuberculosis str. k10
MRIGVLTGGGDCPGLNAVIRAVVRTCDSRYGSSVVGFQDGWRGLLENRRIQLHNDDRNDRLLAKGGTMLGTARVHPDKLRAGLNQIKQTLDDNGIDVLIPIGGEGTLTAAHWLSEENVPVVGVPKTIDNDIDCTDVTFGHDTALTVATDAIDRLHSTAESHQRVMLVEVMGRHAGWIALNAGLASGAHMTLIPEQPFDVEEVCRLVKRRFQRGDSHFICVVAEGAKPIPGSISLREGGIDEFGHERFTGVAAQLGAEVEKRINKEVRVTVLGHVQRGGTPTAYDRVLATRFGVNAADAAHAGEYGQMVSLRGQDIGRVPLADAVRQLKLVPESRYDDAAAFFG

SEQ ID NO: 11182 - protein, 381 aa, Nicotiana tabacum
MEVISTNTNGSTIFKNGAIPMNGYQNGTSKHQNGHQNGTSEHRNGHQNGISEHQNGHQNGTSEHQNGHQNGTISHDNGNELQLLGSSNSIKPGWFSEFSALWPGEAFSLKVEKLLFQGKSDYQDVMLFESATYGKVLTLDGAIQHTENGGFPYTEMIVHLPLGSIPNPKKVLIIGGGIGFTLFEMLRYPTIEKIDIVEIDDVVVDVSRKFFPYLAANFSDPRVTLVLGDGAAFVKAAQAGYYDAIIVDSSDPIGPAKDLFERPFFEAVAKALRPGGVVCTQAESIWLHMHIIKQIIANCRQVFKGSVNYAWTTVPTYPTGVIGYMLCSTEGPEVDFKNPVNPIDKETTQVKSKLAPLKFYNSDIHKAAFILPSFARSMIES

SEQ ID NO: 11183 - protein, 446 aa, Corynebacterium diphtheriae NCTC 13129
MARSVVVWFRDDLRVHDNPALMKAWELVRANPADLHAVYIANEVGVRPLGGAVKWWLHHSLLALSEQLAQRGVRLHVLSGDPLTLLPQLVTSCGATAVTMNRRYDPAARSIDDAFVADASAHDVEVYDFPCHLLAEPGEITTTTGGSYKVFTPFSRNLRDAIGDLPLDTLAAPPKAEQPIDDTETQAAIADLGWDAWWAASISKAWTPGEPAAREALAELDDILPRYLDDRDRPDIDGTSRLSPRLRFGELSVAEVWNHAHTSEGFRRQLMWRDFAWHRLDAHPDMATANIRPEFDHFPWDGGDFEAELNAWRHGRTGIALVDAGMRELWATGTMHNRVRMVAASLLVKNLGIHWRHGEQWFWDTLVDADPASNPFNWQWVAGSGDDAAPYFRIFNPDTQARRFDPDGTYRTRWLPIMSADYPEEAIVDLKESRLRALDAYNACKR

SEQ ID NO: 11184 - protein, 419 aa, Nicotiana tabacum
MEVISTNTNGSTIFKNGAIPMNGHQSGTSKHLNGYQNGTSKHQNGHHNGTSEHRNGHQNGISEHQNGHQNGTSEHRNGHQNGISEHQNGHQNGTSEHQNGHQNGTSEQQNGTISHDNGNELLGNSNSIKLGWFSEFSALWPGEAFSLKVEKLLFQGKSDYQDVMLFESATYGKVLTLDGAIQHTENGGFPYTEMIVHLPLGSIPNPKKVLIIGGGIGFTLFEMLRYPTIEKIDIVEIDDVVVDVSRKSFPYLAANFNDPRVTLVLGDGAAFVKAAQAGYYDAIIVDSSDPIGPAKDLFERPFFEAVAKALRPGGVVCTQAESIWLHMHIIKQIIANCRQVFKGSVNYAWTTVPTYPTGVIGYMLCSTEGPEVDFKNPINPIDKETTQVKSKLAPLKFYNSDIHKAAFILPSFARSMIES

SEQ ID NO: 11185 - protein, 431 aa, Leptospira interrogans serovar Copenhageni str. Fiocruz L1-130
METKIQNFGECSIPSPADYEYYTSDTSRLIFRTVFQSKEDWNSYVQEGPDFFEQAGPREKIYFNPQEVTAGIVTCGGLCPGINDVIRGIVMELYYRYGVSRILGFPYGYQGLVKRYSHQPIELTPEKVAHIVDEGGSMLSSSRGNQSPEEMVDSLSFYGVKILFCIGGDGTLRGARTIVDEIAKRKEKISVVGIPKTIDNDINYVQKTFGFSTAFSKAMEAVECAHVEAKGAPNGIGLVKLMGRHSGFIAVNAALASRNVNYCLIPEVDFDLFGNEAFLDDLKKRIQKKGHAVIIVAEGAGQKFFDSTEERDSSGNLKLKDIGLFLKDTMTEFFKKENIPVNIKYIDPSYIIRSIPANAEDSVFCGFLAQNAVHAGMAGKTDMVVGMWNNVFTHLPISVAIQERKVLQPDRSTLWRSLLASTGQPAHMLAK

SEQ ID NO: 11186 - protein, 490 aa, Erwinia carotovora subsp. atroseptica SCRI1043
MSRYGLQQLYINGAYVDSTGNDTFDAVNPANGDIIACIQSATAADVDRAVSAATAGQKVWAAMTAMERSRILRRAVDILRERNDELALLETHDTGKPLSETRTVDIVTGADVLEYYAGLIPMLEGQQIPLRDTSFVYTRREPLGVVAGIGAWNYPIQIALWKSAPALAAGNAMIFKPSEVTSLTALKLAEIYTEAGLPAGVFNVLTGTGKSVGQALTTHPGIAKVSFTGGIASGKTVMANAAGSTLKDVTMELGGKSPLIIFDDADLDKAADIAMMANFFSSGQVCTNGTRVFVPKALQAQFEEKILACVQRIRAGDPTDESVNFGPLVSFPHRESVLRYIESGKREGARVLVGGEPMTDGDYAQGAYVAPTVFTDCRDDMKIVRKEIFGPVMSILTYQDEDEVIRRANDSEYGLAAGIVTRDLNRAHRVIHQLEAGICWINTWGESPAEMPVGGYKHSGVGRENGVTTLEHYTQIKSIQVELGEFRSVF

SEQ ID NO: 11187 - protein, 473 aa, Populus tremula x Populus tremuloides
MSNQKHGEEAMVSSFNDTEHEEKEEVSKDESGFRLKSLLWHGGSVYDAWFSCASNQVAQVLLTLPYSFSQMGMLSGIILQIFYGFLGSWTAYLISVLYVEYRSRKEKENVNFKNHVIQWFEVLDGLLGPTWKAVGLAFNCTFLLFGSVIQLIACASNIYYIDDKFDKRTWTYIFGACCATTVFIPSFHNYRIWSFLGLGMTTYTAWYMTIASLVHGQVDGVTHSGPAKAVLYFTGATNILYTFGGHAVTVEIMHAMWKPQRFKYIYLLATLYVFTLTLPSAAATYWAFGDQLLTHSNAFSLLPRTGWRDAAVILMLIHQFITFGFACTPLYFVWEKVIGMHDTKSILLRALCRLPVVIPIWFFAIIFPFFGPINSAVGALLVTFTVYIIPALAHMLTYRSASARQNAVEKPPVFLPSWTAMYVLNAFIVVWVLVVGFGLGGWASMSNFIKQVDTFGLFAKCCQCPRSAAAKHH

SEQ ID NO: 11188 - protein, 79 aa, Glycine max
  unsure (1)..(79): unsure at all Xaa locations
MATAMIAWAAVTTADRADPRMHAPFTGLKSMAGFTTRKTNHDISSIATNAVRVLCMHEWTPVLMKKYETLYXLPDLDDP

SEQ ID NO: 11189 - protein, 292 aa, Zea mays
MASSSRSTVFSLLLLVALLLSCSGMSSAARLLEEAPPKEEHPHPAVPELPEPELPPHPTDVVPPELPKPELPPHPAVVPELPKPEVPHPVPEQPKPELTPHPAAVPELPKPEVPHPTAVPELPKPEVPHPVPELPKPEVPPHPTAVPELPKPEVPHPVPELPKPELTPHPAAVPELPKPEVPHPVPELPKPEVPPHPTAVPELPKPEVPHPVPELPKPELPPHPVVPELPKPEVPHPVALELPKPELPPHPTVPKLPHPEVPEVPNHELPPLPKAELPPKPEGHYPEPEAKP

SEQ ID NO: 11190 - protein, 479 aa, Rubrivivax gelatinosus PM1
MVTEYRNYIDGEFLANRSGALIDVHNPATHELLARVPDAPNDVVDLAVQAARTAQPGWAKLPAIQRAQHLRAIAARLRENVEELAHTITAEQGKVLGLARVEVNFTADYMDYMAEWARRLEGEVLTSDRVGESIFLMRKPIGVAAGILPWNFPFFLIARKLAPALITGNTIVIKPSEITPINAFEFARLASQTDLPRGVFNLVGGTGAGAGAQLTSHRDVGIVSFTGSVETGTRIMTAASKNLTRVNLELGGKAPAIVLADADLDLAVKAIYDSRVINTGQVCNCAERVYVQRKVADEFTSKIAARMAGTLYGDPLAQPDVAMGPLVSQAGLDKVAGMVDRARAAGASIVQGGRKANRDKGYHYEPTVIANCSADMEIMRKEIFGPVLPIQVVDELDEAIALANDSDYGLTSSIFTKDLNSAMRAVRDLQFGETYVNREHFEAMQGFHAGRKKSGIGGADGKHGLYEFTETHVVYIQHG

SEQ ID NO: 11191 - protein, 120 aa, Aerides japonica
MARSTASMAVVCIVSFLLVSGVFREASGTITCGQVVSTLTPCISYIRGDSTLPQTCCSGVKKLNALASTSPDRQGACSCLKNLASHIPNLNPARAAGLPGNCGVSVPYPISTSTDCSKVR

SEQ ID NO: 11192 - protein, 399 aa, Bacillus cereus G9241
MLENQINERSLLLHKELVGKIEITSKVEVNSADDLSLTYTPGVAESCKAIAADEETVYDYTARGNMVAVVSDGTAVLGLGNIGPKAAMPVMEGKSILFKKFANVDAFPLCLGTTDVDEIVTLVKNLEPTFAGINLEDIAAPRCFEIEKRLKEETSIPVFHDDQHGTAIVVLAAVINALKVVSKQMDHVKIVINGAGSAGIAIGKLLLKAGAKHITLVSLEGIVCEGEAWMNEAQIEVSKKTNREHVRGTLKEAIHQADIFIGVSAPNVLTKELVKTMNEKAIVFAMANPIPEIFPEDALEAGAAVVGTGRSDYANQVNNVLAFPGIFRGALDVRATDITEEMKLAAAYGIANIITDEERNANYVIPNPLDKRVVPSVAEAVAKAAIDSGVAQITKIPSY

SEQ ID NO: 11193 - protein, 497 aa, Emericella nidulans
MSDLFTTIETPVIKYEQPLGLFINNEFVKGVEGKTFQVINPSNEKVITSVHEATEKDVDVAVAAARAAFEGPWRQVTPSERGILINKLADLMERDIDTLAAIESLDNGKAFTMAKVDLANSIGCLRYYAGWADKIHGQTIDTNPETLTYTRHEPVGVCGQIIPWNFPLLMWSWKIGPAVAAGNTVVLKTAEQTPLSALYAAKLIKEAGFPAGVINVISGFGRTAGAAISSHMDIDKVAFTGSTLVGRTILQAAAKSNLKKVTLELGGKSPNIVFDDADIDNAISWVNFGIFFNHGQCCCAGSRILVQEGIYDKFVARFKERAQKNKVGNPFEQDTFQGPQVSQLQFDRIMEYINHGKKAGATVATGGDRHGNEGYFIQPTVFTDVTSDMKIAQEEIFGPVVTIQKFKDEAEAIKIGNSTDYGLAAAVHTKNVNTAIRVSNALKAGTVWINNYNMISYQAPFGGFKQSGLGRELGSYALENYTQIKTVHYRLGDALFA

SEQ ID NO: 11194 - protein, 550 aa, Triticum aestivum
  unsure (1)..(550): unsure at all Xaa locations
MAAAATRRAASSLASRCLLARPAASPAAVPSALRRADGARGLLPGLLQRFGTAAAAEEPISPSVQVGETQLLINGKFVDAASGKTFPTVDPRTGEVIARVAEGDAEDVDRAVVAARKAFDEGPWPRMTAYERSRILLRFADLIEKHNDDIAALETWDNGKPYEQAAHIEVPMLARLMRYYAGWTDKIHGLIVPADGPHHVQVLHEPCWGLWADHPVELPTFDVRLVTAPGPRNWQLLHEPIGVVGQIIPWNFPLLMXAAELALLLPXDSTMVLTYSRQTPLSAHCVSKLLHEAGLPXGVLNIVSGFRPNSWAALASHMDVDKIAFTXDDADIDQAVELAHFALFFNQGQCCCAGSRTFVHERVYDEFVEKSKARALKRVVGDPFRKGVEQGPQIDDEQFKKILRYIKSGVDSGATLVTGGDKLGDKGYYIQPTIFSDVQDGMKIAQEEIFGPVQSIFKFNDLNEVIKRANASQYGLAAGVFTNNLDTANTLTRALRAGTVWVNCFDIFDAAIPFGGYKMSGIGREKGIDSLKNYLQVKAVVTALKNPAWL

SEQ ID NO: 11195 - protein, 497 aa, Emericella nidulans
MSDLFTTIETPVIKYEQPLGLFINNEFVKGVEGKTFQVINPSNEKVITSVHEATEKDVDVAVAAARAAFEGPWRQVTPSERGILINKLADLMERDIDTLAAIESLDNGKAFTMAKVDLANSIGCLRYYAGWADKIHGQTIDTNPETLTYTRHEPVGVCGQIIPWNFPLLMWSWKIGPAVAAGNTVVLKTAEQTPLSALYAAKLIKEAGFPAGVINVISGFGRTAGAAISSHMDIDKVAFTGSTLVGRTILQAAAKSNLKKVTLELGGKSPNIVFDDADIDNAISWANFGIFFNHGQCCCAGSRILVQEGIYDKFVARFKERAQKNKVGNPFEQDTFQSPQVSQLQFDRIMEYINHGKKAGATVATGGDRHGNEGYFIQPTVFTDVTSDMKIAQEEIFGPVVTIQKFKDEAEAIKIGNSTDYGLAAAVHTKNVNTAIRVSNALKAGTVWINNYNMISYQAPFGGFKQSGLGRELGSYALENYTQIKTVHYRLGDALFA

SEQ ID NO: 11196 - protein, 285 aa, Burkholderia cepacia R1808
MSTTLLFHPTPDAAYGFPNARRLAHVASPHQHIEVWDTPQLGRLFTLDGRPMTSVGDEYVYHECMTHPAALAHPCPKKALVLGGGDGGAARQLLKHACIERIVVAELDDEVVGMARRYLDDVHQGALDDPRVEVVIGDAAQFVASTVEHFDLVVFDLTPPDSPAAGLYTREFYARLKRILTPRAALSMHLGSPLFHAARIAALLDDLRASFAFVDPLSAHVPLYGSQWLMAIASDTLDAAALFAHDVDERLAARRVHGLRYYDARLHAALFALPRALRDTLGGRR

SEQ ID NO: 11197 - protein, 252 aa, Zea mays
FQAGTGIAELIALEISKQTNAPIEECRKKVWLVDSKGLIVDSRKGSLQPFKKPWAHEHEPLKTLYDAVQSIKPTVLIGTSGVGRTFTKEIIEAMSSFNERPIIFSLSNPTSHSECTAEQAYTWSQGRSIFASGSPFAPVEYEGKTFVPGQSNNAYIFPGLGLGLVISGAVRVHEDMLLAASKALADQATQDNFEKGSIFPPFTSIRKISAHIAAAVAAKAYELGLATRLPPPSDLVKYAENCMYTPVYRNYR

SEQ ID NO: 11198 - protein, 491 aa, Pseudomonas putida
MKHYRNYVNGKWTESSRTFDDVSPVDGSLVAIVHEASRELVDEAVKSGHQALSGEWGRTTATQRVALLRRIADEMERRQGDFLAAEMADTGKPHSMASSIDVPRGIANFRTFADILATAPVDSHRLDLADGAYALNYSARKPLGVVGVISPWNLPLLLMTWKVAPALACGNTVVVKPSEDTPGTATLLAEVMEAAGVPPGVFNLVHGFGPNSAGEFISSHPDISAITFTGESRTGTTIMRAAAEGVKPVSFELGGKNAAIIFADCDFDKMLDTMMRALFLNSGQVCLCSERVYVERPLYDRFCAALVERIKGMKIDWPQDPATQMGPLISAKHRDKVLGYFELARTEGATFLAGGGVPHFGDSRDDGAWVQPTVITGLGDDARSVREEIFGPICHVSVFDNEQEVIARANDTRYGLAATIWTSNLGRAHRVSEAMRVGISWVNTWFLRDLRTPFGGAGLSGIGREGGMHSLNFYSELTNVCIRIDEEVADV

SEQ ID NO: 11199 - protein, 182 aa, Triticum aestivum
MSDEAASPPGGGGGGGGGGSDDGGGGGGFGGVREQDRFLPIANISRIMKKAIPANGKIAKDAKETVQECVSEFISFITSEASDKCQREKRKTINGDDLLWAMATLGFEEYIEPLKVYLQKYRETEGDSKLAGKSGDVSVKKDALGPHGGASGTSAQGMGQQVAYNPGMVYMPPQSHNGDIST

SEQ ID NO: 11200 - protein, 211 aa, Paxillus involutus
MAEGSNYDFLFKVVLIGDSGVGKSNLLSRFTRNEFNLDSKSTIGVEFATRSINVDSKTVKAQIWDTAGQERYRAITSAYYRGAVGALLVYDISKHATYVNVTRWLKELRDHADSNIVIMLVGNKSDLKHLRAVPTEEAKNFSAENELSFIETSALDASNVESAFQTILTDVYRIVSTKSLEQSSDPIRAPTSDTIPVAIDSSAPTKNGSCC

SEQ ID NO: 11201 - protein, 419 aa, Rhodococcus ruber
AAERERMIWRVGDLLTQRAEEFGQLEALDNGKSAVIAAAVDTAWSADIFRYYAGWATKIEGSTVNVTMPFVPGGEFHAYTLREPVGVCGLIVPWNFPLLMAAFKLAPALAAGNTVILKPAEQTPLTALLLAEIFEEAGFPPGVVNIVPGFGDAGAALAAHDDVDKIAFTGSTEVGKKVVDAAKGNLKKVSLELGGKSPNIVFADADFDAAVQGSLDAWLFNHGQCCVAGTRLFVERPIFERFTEAVAEAASKVKIGPGLDPATQLGPLVSQEQLDRVTGYLREGLIDGARALTGGKRWGDKGFFVEPTVLVDVQPDFSVVREEIFGPVVNAMPFDADDGISAAANDSIYGLAAGIWTRDLSKAHRTARRLKAGSVWINQYNGFDTAMPFGGFKQSGWGRELGAGALDLYTQTKAVNIAL

SEQ ID NO: 11202 - protein, 375 aa, Zea mays
  unsure (1)..(375): unsure at all Xaa locations
RVTGKTKDEIEESISMVEILAVQLSKREAELLQQKEEVTKFAKSLKQASEDAKRIVEEERANAHTEIETAKGAVQRVQQAVQEHEKMSQNTGKQKQDMEELKKEVREARRIKMLHQPSKAMDLENEIRILRNTFAEKSKDCVSLLKELETHKRLKENGTIPSFDLEGLQCLGSMLRIVGLSGTHMDLSNISIQWFRIHPKESNKEIISGATRPVYALEPHDVGRYLQAEIDVGGEIAVAKTAGPVDPDAGLVDYVETLVRKPETEFNVVVLQSNGVDQPKESVHVLNVGRLRMRLTKGKSVVAKEFYSSSMQLCGVRGGGEAASQAMFWRPRNDLSLVLAFESTRERNTAIMLARRFAVDCXNIILAGPGDKTPW

SEQ ID NO: 11203 - protein, 413 aa, Aspergillus fumigatus
MPLTPEQVQIIKATVPVLAEHGTTITTVFYKNMLTAHPELNNVFNTTHQVTGHQARALAGALFAYASNIDNLGALGPAVELMCHKHASLYIKPDDYKIVGKFLLEAMGQVLGDALTPEILDAWATAYWQLADIMIGREAQLYEQAEGWTDFRDFVVALKVPESSEITSFYLKPADGKPLPAFQPGQYISVQVHVPELNYLQARQYSLSDMPRSDYYRISVKKESGLNPAEPGAKAHPGHVSNILHASVNEGDTIKVSHPFGDFFLSDAKAAHPVVLLSAGVGLTPMTSILNTLTSQAPERKVSFIHGARNARARAFKNHITSLEQKLPNLKSTFFTSHPTEEDKEGDDYQFRGRVDLSQLDSNRDLFLDDATTEYYVCGPDTFMTDMLNVLKSKGVSEDRVKLELFGTGGVPH

SEQ ID NO: 11204 - protein, 315 aa, Arabidopsis thaliana
MRIDLSVPKVGAELELNKVLGKGSSGSVSLIKYKSRLDGQTLYAAVKTSNIIHADSLLKEFQILSEFKGCSRIVQCYGTKVQETINEEGDVEFTIPMEYASGGSLRHFMSRFKDMKLPDALIRRFTRMILEGLAVIHGHGYVHCDLKPENILVFPSFELKISDFGLSKREGDSKWWLPSHPFAGTPVYMSPESISNGETRRGLDLWSLGCVVLEMYTGKRPWWDKNYDLGDLKKGSMPLISKDIPCDAKLFVMTCFASETNKRKNAFTLLRHCFLRGDVNKIIEPLVKSKNSNDIALELENIEHRLSQLRCISGG

SEQ ID NO: 11205 - protein, 150 aa, Lactobacillus delbrueckii subsp. lactis
  unsure (1)..(150): unsure at all Xaa locations
NREIYNFKPLREELIKAGHTFSTKADTEVILHGYEEWGMDGILKRVRGMFAFIIWDDNTQTMYGARDFFGIKPMYYQDVDGHLLVGSELKSFLPFPHFKKELNTEAVKPYLMNQYNDLKETFFKGVYRFQPGHWFEXKDGKMKTHQYWDA

SEQ ID NO: 11206 - protein, 222 aa, Triticum aestivum
  unsure (1)..(222): unsure at all Xaa locations
FYKLLIDNVEXELLPVVYTPVVGEACQKYGXSIYRRPQGLYISLKDKGKVLEVLKNWPERSIQVIVVTDGERILGLGDLGCQGMGIPVGKLSLYTALGGVRPSACLPITIDVGTNNETLLNDEYYIGLRQRRATGEEYHELLQEFMNAVNLLPPHANQLKLQRRNLKHRLVFFCVRLCVCVLLCCSTLLCCTVMYCLREHGTHLSICVEVRHRRRRFFCQIS

SEQ ID NO: 11207 - protein, 357 aa, Triticum aestivum
  unsure (1)..(357): unsure at all Xaa locations
MGSMAAEMTAVEEEACIYAMQLSSTAVLPLTLKNAIELGMLEVLMGAGGKMLSPSEVAARLPPTTTNPDAPAMVDRMLHLLASYKVVSCEVEEGTHARRYGPTPVCKWFTPNQDGISMAPLLLLTNDKVPMESLYHLKDAVLDGGLPFHKAHGMTMYEYTKTDARLNRVFNEAMKGYTTIITXKLVDLYTGFHRIAILVDVGGGVGSTIRAVTSKYPHIKGINFDLPHVIAEAPQSPGVQHVAGDMFKNVPSGDAIILKWILHNWPDEHCTTLLKNCYGALPAQGKVVIVEGILPVKPEATSRGQQASLTDMIMLTHTAGGKERNQREFEELAMSAGFTSVKTAYIHSNTWVIEFTK

SEQ ID NO: 11208 - protein, 356 aa, Lactococcus lactis subsp. lactis Il1403
MRAARFYDRGDIRIDEINEPIVKAGQVGIDVAWCGICGTDLHEFLDGPIFCPSAEHPNPITGEVPPVTLGHEMSGVVNFIGEGVSGLKVGDHVVVEPYIVPEGTDTSETGHYNLSEGSNFIGLGGNGGGLAEKISVDERWVHKIPDNLPLDEAALIEPLSVGYHAVERANLSEKSTVLVVGAGPIGLLTAAVAKAQGHTVIISEPSGLRRKKAQEAQVADYFFNPIEDDIQAKVHEINEKGVDAAFECTSVQPGFDACLDAIRMGGTVVIVAIWGKPASVDMAKLVIKEANLLGTIAYNNTHPKTIDLVSTGKIKLDQFITAKIGLDDLIDKGFDTLIHHNETAVKILVSPTGKGL

SEQ ID NO: 11209 - protein, 344 aa, Mesorhizobium loti MAFF303099
MSNMMKALVKAKAEPGIWMEEVPVPEIGPNDVLIKIRKTAICGTDVHIYNWDQWAQKTVPVPMVTGHEFVGTVADFGAAVTEYKVGQRVSGEGHIVCGHCRNCRAGRGHLCRNTLGVGVNRPGAFGEYLAIPQHNVVPIPDDVPDEIAAIFDPLGNAVHTALSFDLVGEDVLVTGAGPIGIMGALVAQCVGARKVVITDINPVRLALAKKLGVQHVVDASKEKLRDVMPVLGMTEGFDVGLEMSGAAPAFRDMIDTMNNGGKIAILGIAPTGFEIDWNKVIFKMLHLKGIYGREMFETWYKMIALVQGPLDVSGLITHRIGIDDFQEGFDAMRSGSSGKVVMDW

SEQ ID NO: 11210 - protein, 346 aa, Escherichia coli CFT073
MKSVVNDTDGIVRVAESVIPEIKHQDEVRVKIASSGLCGSDLPRIFKNGAHYYPITLGHEFSGYIDAVGSGVDDLHPGDAVACVPLLPCFTCPECLKGFYSQCAKYDFIGSRRDGGFAEYIVVKRNNVFALPADMPIEDGAFIEPITVGLHAFHLAQGCENKNVIIIGAGTIGLLAIQCAVALGAKSVTAIDISSEKLALAKSFGAMQTFNSREMSAPQIQGVLRDLRFNQLILETAGVPQTVELAVEIAGPHAQLALVGTLHQDLHLTSATFGKILRKELTVIGSWMNYSSPWPGQEWETASRLLTERKLSLEPLIAHRGSFESFAQAVRDIARNAMPGKVLLIP

SEQ ID NO: 11211 - protein, 382 aa, Burkholderia cepacia R18194
MMRDAANFEPTDSRVTRPAFWNGLPERWTSDVEETLVCCHVRQETHDVKSFFFRSPQGRSFSFEPGQFLTLELDIDGETINRCYTISSSPARPHTVSITVKRVPGGKVSNWLHDNLQPGAPVRVLGPAGEFTCARHPARKYLFLSAGSGVTPLMSMSRAHHDLAEDRDILFVHSARTPDDIIFARELDLIASNHTNFRTSFVVERVGARTNWPGVTGFLTLPLLKLIAPDFMEREIFTCGPAPYMKAVRDLLDEAGFERKQYHEESFSFETLAQTASDELLADLAPPAEGADTDTKQYTVSFAKSNREISCGSEQHVLDAARQSGVRLPASCTQGMCGTCKVKLVSGQVEMKHNGGIRQREIDQGMVLLCCSKPLSDLVIDK

SEQ ID NO: 11212 - protein, 180 aa, Bacteroides thetaiotaomicron VPI-5482
MKSFILMVITMVCAISLEAQNKSFYDFNVTTIDGKEFPLSSLKGKKVLVVNVASKCGLTPQYAKLQELYDKYKDKNFVIIGFPANNFMGQEPGSNEEIAQFCSLKYDVTFPMMAKISVKGKNMSPLYQWLTEKKLNGKEDAPVQWNFQKFMIDENGNWVGFVAPKESPLSEKIVTWIEQE

SEQ ID NO: 11213 - protein, 318 aa, Ralstonia eutropha JMP134
MNQLEQLKQFTTVVADTGDFQLMKQYTPQDATTNPSLILKAVQKPEYRGLLEQAVRDYHNEGGVDAVMDGVLIAFGCEILAIVPGRVSTEVDARLSFDTEATVEKARHLIRLYEQRGVARERVLIKIASTWEGIRAAEILQREGIRCNMTLLFSLVQAVACAEAGAQLISPFVGRILDWYKKQAGDQWDAAANAGDNDPGVRSVRQIYDYYKKFGYNTEVMGASFRSTAQIVALAGSDLLTISPDLLEQLARTEGTVERKLSVDLAQAGNIARIPADEPAFRWQLNEDAMATEKLAEGIRLFAADAIKLEKLVAEIAG

SEQ ID NO: 11214 - protein, 318 aa, Psychrobacter sp. 273-4
MDKRVSIQWFPGHMNKARNEIKEIMPQMDVVIEVIDARIPYSSENPMVAALRGEKPVIKILNKADLADPELTQAWMDYLEQQNGVKAIACDTDKANDVKRIIAICKQLVPNKVGTGRQIKAMIMGIPNVGKSTLINTLAGRAVARTGDEPAVTKSQQLIKLDDDIMLYDTPGMLWPKVENENSGYRLAATGGIRDTAFDFADVASYTAEYLLTAYPELLKTRYKIEELPKTDWEFFEIAGRNRGCVRAGNKVDTYRMSEILVNELRSGKIGRITLEKPAMTEAEEVIVAEQRIASEEKRIAKEEEKRLRRLKTRKNRK

SEQ ID NO: 11215 - protein, 387 aa, Streptomyces coelicolor A3(2)
MEAPHRLRTGRRTPLITRSRLMSDFVPGLEGVVAFETEIAEPDKEGGALRYRGVDIEDLVGHVSFGNVWGLLVDGAFNPGLPPAEPFPIPVHSGDIRVDVQSALAMLAPAWGLKPLLDIDAAQARDDLARAAVMALSYVAQSARGQSLPMVPQREIDKAQSVVERFMIRWRGEPDPKHVAAVDAYWTSAAEHGMNASTFTARVIASTGADVAAALSGAVGAMSGPLHGGAPSRVLHMIEEIERTGDAEAYVKKTLDAGERLMGFGHRVYRAEDPRARVLRRTARELGAPRYEVAEALEKAALAELHARRPDRVLATNVEFWAAIMLDFAEVPAPMFTSMFTCARTAGWSAHILEQKRTGRLVRPSARYTGPGTRDPREIEGYADIAG

SEQ ID NO: 11216 - protein, 488 aa, Chloroflexus aurantiacus
MAMRYLIKNGTIIDPANRVATIGDILVANGKVERLYDLADLHTDREPLAPDVEVINARGCVVAPGFTDLHTHLRQPGEEHKETIASVSAAAAVGGFTTLCARPTTRPTPDHAAAIRQLRELADQYARVRIDLIGALTMGNEGQVLSEMRELAEAGCIAFSDGGRTIANTALLRHALAYAAALKLPVMVSCQDPYLAAGGVAHEGAVSIRLGLPAIPAAAEEAIVARDIALAEATGAHLHISRVSTAGSVALIRAARARGVHVTAEVTPHHLTLSDRWLLGWLEERNEIETGRPGAHPDLSLPSWLNPALLPPYDSSTRVDPPLRSIEHVEALVEGLRDGVIDAIATDHAPHALVDRDCEYGIAPPGISGLETALALTLTLVHRGEMDIVNLIAKLTEGPAQVLNRSPANLRPGATADIVIFDPERSWVVDPDHFASRGRNTPLRGQRLKGQVMLTMAAGKIIFRREDFGRQAQAAPQPSRLEGILGAE

SEQ ID NO: 11217 - protein, 88 aa, Glycine max
EGERHSSPLDCIPSTLFLTEVTYVDFLDRVHTSEVKLRSKGLWDVPHPWLNLFIPKTKIHHFAEVVFGNIVKETSNGPVLIYPVNKSK

SEQ ID NO: 11218 - protein, 214 aa, Neurospora crassa
MSDHEFGALSTPSSTEKCGDHSAKMDEYSGYRYAYASEPWIVSGSGVSPPPSSLLFDSFLFLSGYWDAVSSRDVVVEDNAKQLGEPKATFRLATVQKIVSEILPSSTGLSFAKEARDLLIDLCVEFISLVSSEANEISEKESKKTIACDHITQALERLGFADYVPAVLEAAAEHKEVQKGREKKANKFEQSGLSLEELERIQREQFADAAARHT

SEQ ID NO: 11219 - protein, 452 aa, Rubrivivax gelatinosus PM1
MGDSLNAALLQRDHRHLVHSLHNEAAHLAGNVWVKGEGTTLTDADGKRYVDAMSGLWNVTLGYGRRELVDAAAAQMGELAYASGYAGSTNLRAMELAEKLAADRVYPNMHRFFFTSGGGESTDSTIKTARYYWKAQGKPGKFKTLSVMGGYHGVTLAAMCATGMPAYWPSFEPRMPGFVHIPNHDAYRYTVPPGGDPATAAADELERAILAEGPDTVALFIAEPVMGGGAYVPPAGYFRRIREICDRYDVLFATDEVITGFGRTGKLFALGHWGSDVQPDLVQFAKGITSGYVPMGGVGLSDKVAAVFDRPGADTWMHCYTYSGHPVACAVALATLDVIEREGLLARAQVLGDRLLRGLRGALGGHPNVGDIRGLGLIAAVELVEDRFSKKSFDPARKMGPQVLAQVRQRGVITRGRGDTIYLGPALVSDEATIDRIVEAVAEGVGALLPAA

SEQ ID NO: 11220 - protein, 642 aa, Glycine max
MLLRPEGWLGLLAVMEPVVVGLGVGLVVLNEAGLGLLIDPLLVLIDDSDRVEIRGNGERGFEGDVGFFVVGFCNQQATTLLLLALHVERSDLIDIEAVEGLKDALDLDLRGRRNGLESDFVDVGEAVRHQKLYGEFLFAAAMCGILAVLGCVDNSQTKRARIIELSRRGPDWSGIHCYEDCYLAHQRLAIVDPTSGDQPLYNEDKTVIVTYEEHGEEFVNMLDGMFAFILLDTRDKSFIAARDAIGITPLYLGWGHDGGLRRWYNPPWFSEDIPSTPYDPTLLRETFERAVVKRMMTDVPFGVLLSGGLDSSLVAAVVNRYLAESESARQWGSQLHTFCIGLKGSPDLKAAKEVADYLGTRHHELYFTVQEGIDALEEVIYHIETYDVTTIRASTAMFLMSRKIKALGVKMVLSGEGSDEIFGGYLYFHKAPNKKEFHEETCRKIKALHLYDCLRANKSTAAWGVEARVPFLDKEFINVAMSIDPEWKMIRPDLGRIEKWVLRNAFDDDKNPYLPKHILYRQKEQFSDGVGYSWIDGLKDHANKQVTDATMMAANFIYPENTPTTKEGYLYRTIFEKFFPKNAAKATVPGGPSVACSTAKAVEWDAAWSKNLDPSGRAALGIHDAAYDAVDTKIDEPKNGTL

SEQ ID NO: 11221 - protein, 447 aa, Wolinella succinogenes
MKSLIWFRRDLRLEDNRTFEQASGEVLPLFIFDSHLLSPLPKEDRRVGYIYGEVMRLKSELRARGLDLAIFYGEPLKILSRLKEQGFSRLFASQDYDSYALSRDEAARELLDCRFVLDNYLFDPNEVLKKEGSPYTIFSAYYNQSLKILSEGHYAKGLDLPKKLAPYPIPAPPSLESMGFSPLPLLESLKILPQKRLEEFSSKITRYALDRDSLEAEATSGLSLFLRFGTLGVREVIRRLKVWQEEGIKVAPFYRQILWREFYAMLLYHFPHSEREDFKPMQMRWSESQERLERWQKGECGVPLVDAGMRELNHTGFMHNRARMVCASFLTKNLHLHWSWGERYFASKLLDYDVAQNAGNWQWCAGSGADAQPFFRIFNPYTQSLKFDPKGEYVKRWIPELRGISTQNWSSEERWEGLKERYLAPIVSAKRSAQEAKAMQNTLRVSS

SEQ ID NO: 11222 - protein, 189 aa, Cucumis sativus
MASSILSSAAVASVNSASPAQASMVAPFTGLKSSAGFPITRKNNVDITTLASNAGKVQCMKVWPPLGLRKFETLSYLPDMSNEQLSKECDYLLRNGWVPCVEFDIGSGFVYRENHRSPGFYDGRYWTMWKLPMFGCTDSSQVIQEIEEAKKEYPDAFIRVIGFDNVRQVQCISFIAYKPQVLLFLSSIC

SEQ ID NO: 11223 - protein, 451 aa, Zea mays
MAEHKGNVLLHKYEMGKLLGQGTFAKVYHARNTATSESVAIKVIDKEKVMKVGLIDQIQREISVMKLVRHPNIVQLYEVMATKTKIYFVLEHVKGGELFNKIQRGRLKEDAARKYFQQLICAVDFCHSRGVYHRDLKPENLLLDENSNLKVSDFGLSALAECHRQDGLLHTTCGTPAYVAPEVINRKGYDGAKADIWSCGVILFVLLAGYLPFHDKNLMDMYKKIEKADFKCPSWFSTDVRRLLQRILDPNPSRRISVKKIMENPWFRKGLGAKLLRYDLQNKNAPHVDKKADFDSLSTNVTTESKQHEEKKPTNMNAFDIISLSTGLDLSGLFEESNKKRESKFTSTNTSSTIISKIEDIAKNLRLNLTKKDGGLLKMEASKPGRKGVMGIDAEVFEVSPNFHLVEIKKTNGDTLEYQKVLNQEMRPALKEIVWAWQGEQSKQKQEQQSC

SEQ ID NO: 11224 - protein, 236 aa, Lotus corniculatus var. japonicus
MLCTRILFFSRTIRFAAPLSSSSLHSFVFSNSPITLSRSYHSSLLTTTSFPIKSLVSTSTTPFSFTLRPDHTMAAPTSVYDFTVKDARGNDVNLGDYKGKVLLIVNVASQCGLTNSNYTELSQLYEKYKSKGLEILGFPCNQFGAQEPGDNEQIQEFVCTRFKAEFPVFDKVDVNGDSAAPLYKYLKSSKGGLFGDKIKWNFSKFLVDKEGNVVERYAPTTSPLSIEKDLVKLLGA

SEQ ID NO: 11225 - protein, 1794 aa, Schizosaccharomyces pombe
MSYPNQMNGSMYGYGANNGVQPGFDSYGMPINQGGMNYQQQTYPYQQPYQPDGYAGNTMLPFQQSQPATQFNNGFGYASQPTGSVADYGQQQQQMYGYNGMMPQTMNNTGFMQPQQTGAIPGFAPQPTGFVQPQPTGFMSQQPASFMQPQRTGGAGFIQPQRTGAMPAYQPQMNNFMQPQKTGGFAPQATGFMQTQPFGAAPSFAPQPTGFVQPQQTGVVMPPQPTGYLQAQPTGPFASFVQPQQTASFMPAAQPLKPQKTGQIHNSKAMDTRLSFVSAADQAKFEQLFKSAVGREEAMSSEIGKAILVRSKLPTVQLSKIWRLSDTTRSGRLLFPQFVLAMYLCNLGLTGKPIPDKVPDGILNEVNAMVDAISFSLDENYAKPTQPIPQAAAQQMAAQMFGGFQQAAGIPSQITGFQPQAMMPQRTGMQPQMTGFQQPMIPQRTGMQPQMTGFQQPMMPQRTGLQPQMTGFQQPMVPQRTGMQPQMTGFQQPMMPQRTGLQPQMTGFQQPMVPQRTGMQPMMPGLQQPMAPQRTGMQPMMPQRTGMQPQMTGFQQPMAPQRTGMQPMMPQRTGMQPQMPGMQQPMAPQRTGMQPMMPQRTGMQQPMAPQRTGMQPMMPQRTGMQPQMPGMQQPMAPQRTGMQPMMPQRTGMQPQMPGMQQPMAPQRTGMQPMAPQRTGMQPMMPQRTGMQPQMPGMQQPMAPQRTGMQPMMPQRTGMQPQMPGMQQPMAPQRTGMQPMAPQRTGMQPQMTGGPMLPQRTGGMAPQPTGMPGQWGFINTPLSNLPGIEALGQQMMPNAPSGGLNNTFQQKKDIPWAISKEEKRIYDQIFDAWDKERKGTLGGNAVLEIFGQSKLTRTELEHIWNLCDHGDKGSLDRDEFAVALHLIYRKLNGNEVPAVLPPELIPPSTRNFTESLNQVKNLIKNDTSNRKPFGAENQSKLKKNSFYDNPSETTEKDATLYRHNDSDASAYVSSARRRDFKEEKIESAPPIINDIDSEIASLKKRIHEKSLVVNALEDKKLAATPANDVQNDSLIYRIKSVQDEINRLSTSNKSPEVASMNVRLEELSTRVSKMLSDINEVDHTIASLSLKLFQAEDTKNSYDQTSPEATQERNRTISSKLAEMEKQKNESKAALEQMKNYVTNIENNIRAKLLPSAANDDAWLSQNVVDESVTRVVKELPVPAPAAPQTLNPPSVSTVQQSKPIESNTHTPEVKATSESPSASSNLEDRAARIKAEAQRRMNERLAALGIKPRQKGTPSPAPVNSATSTPVAAPTAQQIQPGKQASAVSSNVPAVSASISTPPAVVPTVQHPQPTKQIPTAAVKDPSTTSTSFNTAPIPQQAPLENQFSKMSLEPPVRPAVPTSPKPQIPDSSNVHAPPPPVQPMNAMPSHNAVNARPSAPERRDSFGSVSSGSNVSSIEDETSTMPLKASQPTNPGAPSNHAPQVVPPAPMHAVAPVQPKAPGMVTNAPAPSSAPAPPAPVSQLPPAVPNVPVPSMIPSVAQQPPSSVAPATAPSSTLPPSQSSFAHVPSPAPPAPQHPSAAALSSAPADNSMPHRSSPYAPQEPVQKPQAINNIAPATNLGTSQSFSPRMGPVNNSGSPLAMNAAGQPSLAVPAVPSAPSNHFNPFAKMQPPAPSPLQPSGHDSDNWSQHGDEEEEDSEDDIRSSKDAAALAAKLFGGMAPAHPVSTPPVRPQSAAPPQMSAPTPPPPPMSVPPPPSAPPMPAGPPSAPPPPLPASSAPSVPNPGDRSALLQQIHTGTRLKKTVTTDKSKPIAGRVLDASDGNSSAWYGNLS

SEQ ID NO: 11226 - protein, 479 aa, Sphingomonas sp. tfd44
MTYPDTRLFIGGRWQDAADGRSLAVQNPATGLEIGRVAHCGRADLDRALDAAQRGFEIWRDLTPAERSKIMRRAAGLMRERADEIARLLTQEQGKPLHEAKIEAMAAGDIIEWFAEEGFRLYGRLVPHRTDIAIRQMVIKDAVGPVAAFTPWNFPINQVVRKISAALAAGCSMIVKAPEETPASPAELIRAFQDAGLPDGVLNLVFGDPAEISNYLISSPIIRKITFTGSTPVGKLLASLAGKHMKRVSMELGGHAPAIVCEDADIGLAVKSLSASKFRNAGQVCIAPTRFLVHSSIKHAFADALAAAARDLRVGDGFADGTQIGPLANSRRLAAMAEFQQDAIEKGATLLTGGNRVGDVGNFWAPTVLSDVPLEARLFNDEPFGPVAGIRSFDRLEEAILEANRLSFGLAGYAFTKSLATADILARRVEVGMLWVNSPATPTAELPFGGIKDSGYGTEGGPEALDNYINPRAVVVANV

SEQ ID NO: 11227 - protein, 74 aa, Glycine max
MADIDRSFDNNVSAVSTEKSSQVSDVEFSEAEEILIAMVYNLVGERWSLIAGRIPGRTAEEIEKYWTSRFSTSQ

SEQ ID NO: 11228 - protein, 70 aa, Glycine max
AAHTHTYKIEKILFHGKSQYRELLVFETSRQGKGAILDGHIQLTEKDEFAYKETRTHLALWSHTKKKKVL

SEQ ID NO: 11229 - protein, 158 aa, Glycine max
  unsure (1)..(158): unsure at all Xaa locations
ALSMIASITDTTVNLAGAGLDATSTGLKPMVGCPTMKTNNDITYIANNGGRAQCMQVWTPFGSKKYETLSYLPDLDEAQSAKEVEYLIKKGWITCLEYKLDHSFLYRELKMPPXYFEGLSWSLWKVPMFGSTDTSHVLNELQYAXTAYPDSQIRIIGF

SEQ ID NO: 11230 - protein, 512 aa, Salmonella typhimurium LT2
MTNNPPSTRIQPGEYGYPLKLKARYDNFIGGDWVAPADGEYYQNLTPVTGQPLCEVASSGKKDIDLALDAAHKAKDKWAHTSVQDRAAILFKIADRMEQNLELLATAETWDNGKPIRETSAADVPLAIDHFRYFASCIRAQEGGISEVDSETVAYHFHEPLGVVGQIIPWNFPLLMASWKMAPALAAGNCVVLKPARLTPLSVLLLMEIIGDLLPPGVVNVVNGAGGEIGEYLATSKRIAKVAFTGSTEVGQQIMQYATQNIIPVTLELGGKSPNIFFADVMDEEDAFFDKALEGFALFAFNQGEVCTCPSRALVQESIYERFMERAIRRVESIRSGNPLDSGTQMGAQVSHGQLETILNYIDIGKKEGADILTGGRRKELDGELKEGYYLEPTILFGKNNMRVFQEEIFGPVLAVTTFKTMEEALEIANDTQYGLGAGVWSRNGNLAYKMGRGIQAGRVWTNCYHAYPAHAAFGGYKQSGIGRETHKMMLEHYQQTKCLLVSYSDKPLGLF

SEQ ID NO: 11231 - protein, 187 aa, Brassica napus
MSGSLSCSAADLAVLLGPNATAAADYICGQLSTVNNKFTDVAFAVDNTYLLFSAYLVFSMQLGFAMLCAGSVRAKNTMNIMLTNVLDAAAGGLFYYLFGYAFAFGSPSNGFIGKHNFGLKDFPSASADYSNFLYQWAFAIAAAGITSGSIAERTQFVAYLIYSSFLTGFVYPVVSHWFWSVDGWASP

SEQ ID NO: 11232 - protein, 276 aa, Ralstonia solanacearum
MTDTQPAVTLGDGARMPQLGLGLWRTPAGETAGLVRTAIEAGYRLVDTAAAYGNERGVGEGVRAAGAEPAVFVTTKLWNEDQGYDRTLRAFDESLRCLGLPAIDLYLIHWPAPSRGRYVESWRALIRLRDEGRARSIGVSNFGAEHLARIIDETGEAPAVNQIELHPWFQQRALRAFHARHGVRTESWSPLGQGGLLHDLTVREIAARHGKTPAQVVIRWHLDNGLIVIPKSAHPDRIRENIAVFDFCLTPADQAAIAGLDRADGRIGPDPVAAGF

SEQ ID NO: 11233 - protein, 115 aa, Arabidopsis thaliana
  unsure (1)..(115): unsure at all Xaa locations
MAFALRFFTCLVLTVCIVASVDAAISCGTVAGSLAPCATYLSKGGLVPPSCCAGVKTLNSMAKTTPDRQQACRCIQSTAKSISGLNPSXASGLPGKCGVSIPYPISMSTNCNNIK

SEQ ID NO: 11234 - protein, 460 aa, Zea mays
MVNGERRADAECTRASLLGRYEIGRTLGEGNFGKVKYARHIATGGHFAIKILDRSKILSLRIDDQIRREIGTLKLLKHPNVVRLHEVAASKTKIYMVLEFVNGGELFDKIAIKGKLSEHEGRRLFQQLIDGVSYCHDRGVYHRDLKPENVLVDRKGTIKISDFGLSALPQHLGSDGLLHTTCGSPNYIAPEVLQNRGYDGSLSDLWSCGVILYVMLVGCLPFDDRNLVVLYQKIFKGDCQIPKWLSPAAQDLLKRILQPNPMKRINVAGIREHEWFKKDYVPAVPHDDDEDVLPSPAPSIKPIDEPAQEKCSPINAFQLIGMASSLDLSGFFEEEDAAQRKIRFTSTHPPKDLFDKIESVVMEMGFKVHRGAGKLKVLKNSKCSRNPSSLLVCTEVFELGPSLYVVELRKSHGDSTLYRQLCERLSDELGACKTDQIARTESSSDDLSSVDGEAFPLSGF

SEQ ID NO: 11235 - protein, 321 aa, Malus x domestica
ILPFKLPAIGPNDVRIRIKAVGICGSDVHYLKTMKCADFEVKEPMVIGHECAGIVDKVGSEVKHLVPGDRVAVEPGISCARCQQCKGGRYNLCPDMKFFATPPVHGSLANQIVHPADLCFKLPKNVSLEEGAMCEPLSIGVHACRRANVGPETTVLITGAGPIGLVSVLAARAFGAPRIVIVDMDDKRLAMAKSLGADETVKVSTKMEDLDDEVAEIKKAMESEVDVTFDCVGFNKTMSTGLNATRPGGKVCLVGMGHGMMTVPLTPAAAREVDVVGVFRYKNTWPLCLEFLRSGKIDVKPLITHRFGFTEKEVEEASLEF

SEQ ID NO: 11236 - protein, 205 aa, Zea mays
  unsure (1)..(205): unsure at all Xaa locations
MAASSTATSVHDFIVKDASGKDVDLSTYKGKVLLIVNVASQCGLTNSNYTELAQLYEKYKDQGFEILAFPCNQFGGQEPGTNEEIVQFACTRFKAEYPIFDKVLXDVNGSNAAPIYKFLKSSKGGLFGDSIKWNFSKFLVDKEGRVVDRYASILPGSPCHQISPRMNSFPSSWLTRRDRVVDRYAPTTSPLSIEVNFQRCSSHLL

SEQ ID NO: 11237 - protein, 201 aa, Shigella flexneri 2a str. 301
MALHDENVVWHSHPVTVQQRELHHGHRGVVLWFTGLSGSGKSTVAGALEEALHKLSVSTYLLDGDNVRHGLCSDLGFSDADRKENIRRVGEVANLMVEAGLVVLTAFISPHRAERQMVRERVGEGRFIEVFVDTPLAICEARDPKGLYKKARAGELRNFTGIDSVYEAPESAEIHLNGEQLVTNLVQQLLDLLRQNDIIRS

SEQ ID NO: 11238 - protein, 192 aa, Penicillium marneffei
MVVATIKCVVVGDGAVGKTCLLISYTTNKFPSEYVPTVFDNYAVTVMIGDEPYTLGLFDTAGQEDYDRLRPLSYPQTDVFLVCFSVTSPASFENVREKWFPEVHHHCPGVPCLIVGTQTDLRDDPAVREKLAKQKMQPVRKEDGDRMAKELGAVKYVECSALTQYKLKDVFDEAIVAALEPAPKKRPKCVVL

SEQ ID NO: 11239 - protein, 54 aa, Zea mays
MGSETFVEILLAILLPPVGVFLRYGIGVEFWICLLLTILGYIPGIIYAVYVLVA

SEQ ID NO: 11240 - protein, 223 aa, Triticum aestivum
  unsure (1)..(223): unsure at all Xaa locations
LTSFEAGCSTSTSTQSPSPRLPAHRHHPSMAAAAKRGGTGSRGLLMGRYELGRVLGKGTFAKVYHARHLQTGESVAIKVLDREKAVRSGLVSHIKREIAVLRRVRHPNIVHXLFEVMATKTKIYFVMELVRGGELFSRVSKGRLKEDIARRYFQHLISAVGFCHTRGVFHRDLKPENLLVDEAGNLKVSDFGLSAVAEPFQPEGLLHTFCGTPAYVAPRCPRP

SEQ ID NO: 11241 - protein, 378 aa, Nostoc sp. PCC 7120
MMVCEYKPGLEGIPAAQSSISYVDGQKGILEYRGIRIEDLAQQSTFLETAYLLIWGELPTKEELQVFEEEVRLHRRIKYRIRDMMKCFPESGHPMDALQASAAALGLFYSRRDLHNRCYIRDAVVRLIATIPTMVAAFQLMRKGNDPVKPRDDLDYSANFLYMLNEKEPDALAAKIFDICLILHVEHTMNASTFSARVTASTLTDPYAVVASAVGTLGGPLHGGANEEVIQMLEEIGSVENVRSYVEERLQRKDKLMGFGHRVYKVKDPRATILQGLAEQLFAKFGADKYYDIAQEMERVVEEKLGHKGIYPNVDFYSGLVYRKMGIPTDLFTPIFAIARVAGWLAHWKEQLEENRIFRPTQVYNGKHSVTYTPIDQR

SEQ ID NO: 11242 - protein, 449 aa, Zea mays
MSASVGRTRVGRYELGRTLGEGTFAKVKFARNVETGENVAIKILDKEKVLKHKMIAQIKREISTMKLIRHPNVIRMYEVMASKTKIYIVMELVTGGELFDKIASRGRLKEDDARKYFQQLINAVDYCHSRGVYHRDLKPENLLLDASGTLKVSDFGLSALSQQVREDGLLHTTCGTPNYVAPEVINNKGYDGAKADLWSCGVILFVLMAGYLPFEDSNLMSLYKKIFKADFSCPSWFSTSAKKLIKKILEPNANNRITIAELINNEWFKKGYQPPRFETADVNLDDVNSIFDESGEPAQLVVERREERPSVMNAFELISTSQGLNLGTLFEKQTGSVKRETRFASRLPANEILSKIEAAAGPMGFNVQKRNYKLKLQGENPGRKGQLAIATEVFEVTPSLYMVELRKSNGDTLEFHKFYHNISNGLKDVMWKPESGIVEGDEARQRRSP

SEQ ID NO: 11243 - protein, 320 aa, Arabidopsis thaliana
MWVVIAVSHCLRELEVIYSSYPEKPNILPSNLYTCKSLVILELCGEIRLDVPRMAFLPSLKTLQLHSVRYLNEDSLHRLLSNCPVLEDLLVDLLLSDSMEKLTVVVPSLQILSLFIPHSYEIDGIVIETPSLKYFKLIDHNSKSHYCLVKNMPNLIEADIDVELHSIKSLIGSITSVKRLSICSQAMYDGGFVFNQLKHLKLCRCKGHSSDLLVRLLKDSSNLQALDLSEMDYHENHDILYWHQPSTVPECMLLSLQTLNLSAYRGTPEERDLAVYFLKNAVHLKTTTIKSCVFDDERFDMLKELALSSRASTTCQLVFD

SEQ ID NO: 11244 - protein, 143 aa, Triticum aestivum
  unsure (1)..(143): unsure at all Xaa locations
MAPAVMASSATTVAPFQGLKSTAGLPVSRRSGSAGLSSVSNGGRIRCMQVWPIEGIKKFETLSYLPPLSTEALLKQVDYLIRSKWVPCLEFSKVGFVFXVSNNSSPGYYDXRYWTIVESCLCSGWNRTQTARLKRLEGRSKGP

SEQ ID NO: 11245 - protein, 168 aa, Arabidopsis thaliana
MEGVGSRLSRTSSRYSGPAATAVFSGRVRKWKKKWVRVSTSSVGVFRASKSNGRNNSNNSNSPHHLLLHKWTPLTSATVTASDANGSGETEESPKRRFRYAPIAMLEHREKVISKDSEIEETEEFDTESPLPKAVELDMNLTDSDQTKEAKTGNLNLGLCLNSEGTEE

SEQ ID NO: 11246 - protein, 338 aa, Methanosarcina barkeri str. fusaro
MRLAVIEGDGIGREIIPAAVKVLDAFGLEFEKVPLELGYTRWERTGTAISNNDLETIKGCDAVLFGAITTVPDPNYKSVLLTIRKELDLYANVRPVKPLPGITGVTGRNDFDFIIVRENTEGLYSGIEEIGPELSWTKRVVTRKGSERIAEYACKLAKKRKNKLTIVHKSNVLKSDKLFLDVCRQTASANGVEYEDMLVDSMAYNLIMRPERYDIVVTTNLFGDILSDMCAALVGSLGLVPSANIGEKYAFFEPVHGSAPDIAGKGIANPLAAILCVKMLLEWMGEPRSQIIDEAIAYVLQKKIITPDLGGTASTMEVGNAVAEYVLSNIQDRRSPPW

SEQ ID NO: 11247 - protein, 365 aa, Apium graveolens
MAKSSEIEHPVKAFGWAARDTTGLLSPFKFSRRATGEKDVRLKVLFSGVCHSDHHMIHNNWGFTTYPIVPGHEIVGVVTEVGSKVEKVKVGDNVGIGCLVGSCRSCESCCDNRESHCENIIDTYGSIYFDGTMTHGGYSDTMVADEHFILRWPKNLPLDSGAPLLCAGITTYSPLKYYGLDKPGTKIGVVGLGGLGHVAVKMAKAFGAQVTVIDISESKRKEALEKLGADSFLLNSDQEQMKGARSSLDGIIDTVPVNHPLAPLFDLLKPNGKLVMVGAPEKPFELPVFSLLKGRKLLGGTINGGIKETQEMLDFAAKHNITADVEVIPMDYVNTAMERLVKSDVRYRFVIDIANTMRTEESLGA

SEQ ID NO: 11248 - protein, 337 aa, Streptococcus pyogenes M1 GAS
MKRIAVLTSGGDAPGMNAAIRAVVRKAISEGMEVYGINRGYAGMVDGDIFPLGSKEVGDKISRGGTFLYSARYPEFAQLEGQLAGIEQLKKHGIEGVVVIGGDGSYHGAMRLTEHGFPAVGIPGTIDNDIAGTDYTIGFDTAVNTAVEAIDKLRDTSSSHGRTFVVEVMGRNAGDIALWAGIASGADQIIVPEEEFDIEKVASTIQYDFEHKGKNHHIIVLAEGVMSGEAFAQKLKEAGDKSDLRVTNLGHILRGGSPTARDRVIASWMGSHAVELLKDGKGGLAVGIHNEELVESPILGTAEEGALFSLTEEGKIIVNNPHKARLDFAALNRSLSQ

SEQ ID NO: 11249 - protein, 172 aa, Cucumis melo
MDTKIGSLDTCKPQNNVVCCPSNGSVCTIQNSVVPSTVVNSSDATLGRHLARRLVQIGVTDVFTVPGDFNLTLLDHLIAEPALNNIGCCNELNAGYAADGYARSRGVGACVVTFTVGGLSVLNAIAGAYSENLPLICIVGGPNSTIMELTESFIYNGLPDLSQNSKVLKRYL

SEQ ID NO: 11250 - protein, 182 aa, Triticum aestivum
  unsure (1)..(182): unsure at all Xaa locations
MAPTVMASSATSVAPFQGLKSTAGLPVSRRSNGASLGSVSNGGRIRCMQVWPIEGIKKFETLSYLPPLSTEALLKQVDYLIRSKWVPCLEFSKVGFIFREHNASPGYYDGRYWXTMWKLPMFGCTDATQVINEVEXVKKEYXDAYXRIIGFTTSQXQCVSXSPSNGLQESGQTATHTGIYKC

SEQ ID NO: 11251 - protein, 429 aa, Zea mays
MAKSKSSAKAGPPLLGKYELGHLLGRGNFAKVYHARCLGGGDPVAVKVLDKAGLAATGMASRLLREVSAMRRLSHPNVLRLHEVLATRSKVYLVMELAPGGDLLSRLASLPSRRLPEHAARRVFLQLASALIYSHARGVFHRDVKPQNVLLDAEGNLKVSDFGLAALPDSVRDDGRLHTACGTPAFAAPEVLRRRAYDGAKADAWSCGVILFVLLAGHLPFDDANIADMCRRAHRREYTVPRWVSQPARRLVARLLDPNPATRLAVAELAGHPWFKRSLSVDSQLGGLLDGQAERELAFQAPPALNAFDIISMSPGLDLSGLFGEGRRRREKRFMTTASPERAVERLAQAGARLGYFIVGKKGAERLPLGVLPGLVAMSMEMSEVSPELMLVELRLEGGHGDEDEAFGWEELRVELGDVVTAWHVSEEG

SEQ ID NO: 11252 - protein, 357 aa, Rubrobacter xylanophilus DSM 9941
MPEKKMMRAAVYRGPRELRVEPVPVPEIGPSDVLVRVHSCGICGSDLHSYKAGMYIRPGQIMGHEFMGTVAAAGEDVEGVEEGDRVTGFSIGVCGSCYWCSRQQYILCPELFRNSTGYGLPGGFAEYVPIRNAVVGQSIHPVPSELDDETAATTEPVSVGVGAIEAAGVRPGDRVVVLGAGMIGNACMQAARAAGAGQVAVIDVSPVRLEAARSLGADAVFDARTGDALSWVKELWGVGRYHFNEGGMADVVVEAAGAPVTVQQAFEMVRSGGAIVFVGLPEEPAPIDVTKIVHKQPRIVGSLGGDFARAIELMASGSIRTKELITHRFPLEDAAEAFETQLRTGEAMKVMIQPREG

SEQ ID NO: 11253 - protein, 501 aa, Novosphingobium aromaticivorans
MATQLRSAENEYGIKSEYGHYIGGEWIAGDSGKTIDLLNPSTGKVLTKIQAGNAKDIERAIAAAKAAFPKWSQSLPGERQEILIEVARRLKARHSHYATLETLNNGKPMRESMYFDMPQTIGQFELFAGAAYGLHGQTLDYPDAIGIVHREPLGVCAQIIPWNVPMLMMACKIAPALASGNTVVLKPAETVCLSVIEFFVEMADLLPPGVINVVTGYGADVGEALVTSPDVAKVAFTGSIATARRIIQYASANIIPQTLELGGKSAHIVCGDADIDAAVESATMSTVLNKGEVCLAGSRLFLHQSIQDEFLAKFKTALEGIRQGDPLDMATQLGAQASKMQFDKVQSYLRLATEEGAEVLTGGSRSDAADLADGNFIKPTVFTNVNNSMRIAQEEIFGPVTSVITWSDEDDMMKQANNTTYGLAGGVWTKDIARAHRIARKLETGTVWINRYYNLKANMPLGGYKQSGFGREFSHEVLNHYTQTKSVVVNLQEGRTGMFDQ

SEQ ID NO: 11254 - protein, 387 aa, Rickettsia sp. Rf31
SNNNDSEFAELKIRGKIFKLPILKASIGEDVIDISRVSSEADCFTYDPGFMSTASCQSTITYINGDKGILRHRGYDIKDLAEKSDFLEVAYLLIYGELPSIEQYNNFTKQVAHHSLVNERLHYLFQTFCSSSHPMAIMLAAVGSLSAFYPDLLNFKEADYELTAIRMIAKIPTIAAMSYKYSIGQPFIYPDNSLDFTENFLHMMFATPCTKYKVNPIIKNALNKIFILHADHEQNASTSTVRIAGSSGANPFACVSTGIASLWGPAHGGANEAVINMLKEIGSSKNIPKYIAKAKDKNDPFRLMGFGHRVYKNYDPRAVVLKETCKEVLKELGQLENNPLLQIAIELEAIALKDEYFIERKLYPNVDFYSGVIYKAMGIPSQMFTVL

SEQ ID NO: 11255 - protein, 280 aa, Glycine max
  unsure (1)..(280): unsure at all Xaa locations
MGVFSENPNPDPVVIRQVWASNLESEFQLIRELIDHYPFISMDTEFPGVVFRPHLDPTKPYNHRNNNRNRHSDHYRLLKSNVDALNLIQVGLTLTDAAGNLPDLAGNRSIWEFNFRDFDVARDAYALDSIDLLRRQGIDFARNATDGVESTRFAELMMSSGLVCNDSVSWVTFHSAYDFGYLVKILTRRNLPTRLEEFLKTVKXFFGDNVYDVKPMMRFCDTLYGGLDRVARSLNVDRAVGKCHQAGSDSLLTWHAFQKIVDIYFVKEEHRKHAGVLFGL

SEQ ID NO: 11256 - protein, 108 aa, Triticum aestivum
MNRDRWDGNTSAVFPEEEEVFYTVGILRSAVSEGDLGRLEEQNEEILRFCEEAGIPCVQYLPYYAGQAGWEKKHFGPAKWARFVERKRKYDPKAILSRGQRIFTSPLA

SEQ ID NO: 11257 - protein, 113 aa, Rickettsia cooleyi
ANEAVINMLKEIGSSENIPKYIAKAKDKNDPFRLMGFGHRVYKSYDPRAAVLKETCKEVLKELGQLENNPLLQIAIELEAIALKDEYFIERKLYPNVDFYSGIIYKAMGIPSQ

SEQ ID NO: 11258 - protein, 389 aa, Rickettsia sp. RF2125
TNGNNNDSEFAELKIRGKIFKLPILKASIGEDVIDISRVSSEADCFTYDPGFMSTASCQSTITYIDGDKGILRHRGYDIKDLAEKSDFLEVAYLLIYGELPSIEQYNNFTKQVAHHSLVNERLHYLFQTFCSSSHPMAIMLAAVGSLSAFYPDLLNFKEADYELTAIRMIAKIPTIAAMSYKYSIGQPFIYPDNSLDFTENFLHMMFATPCTKYKVNPIIKNALNKIFILHADHEQNASTSTVRIAGSSGANPFACVSTGIASLWGPAHGGANEAVINMLKEIGSSENIPKYIAKAKDKNDPFRLMGFGHRVYKNYDPRAAVLKETCKEVLKELGQLENNPLLQIAIELEAIALKDEYFIERKLYPNVDFYSGIIYKAMGIPSQMFTVL

SEQ ID NO: 11259 - protein, 362 aa, Populus tremula x Populus tremuloides
MSKSPEEEHPVKAFGWAARDQSGHLSPFNFSRRATGEEDVRFKVLYCGICHSDLHSIKNDWGFSMYPLVPGHEIVGEVTEVGSKVKKVNVGDKVGVGCLVGACHSCESCANDLENYCPKMILTYSSIYHDGTITYGGYSDHMVANERYIIRFPDNMPLDGGAPLLCAGITVYSPLKYFGLDEPGKHIGIVGLGGLGHVAVKFAKAFGSKVTVISTSPSKKEEALKNLGADSFLVSRDQEQMQAAAGTLDGIIDTVSAVHPLLPLFGLLKSHGKLILVGAPEKPLELPAFSLIAGRKIVAGSGIGGMKETQEMIDFAAKHNITADIEVISTDYLNTAMERLAKNDVRYRFVIDVGNTLAATKP

SEQ ID NO: 11260 - protein, 347 aa, Escherichia coli CFT073
MELVRSKVMKSILIEKPNQLSIIEREIPTPSAGEVRVKVKLAGICGSDSHIYRGHNPFAKYPRVIGHEFFGVIDAVGEGVESARVGERVAVDPVVSCGHCYPCSIGKPNVCTTLAVLGVHADGGFSEYAVVPAKNAWKIPEAVADQYAVMIEPFTIAANVTGHGQPTENDTVLVYGAGPIGLTIVQVLKGVYNVKNVIVADRIDERLEKAKESGADWAINNSQTPLGESFAEKGIKPTLIIDAACHPSILKEAVTLASPAARIVLMGFSSEPSEVIQQGITGKELSIFSSRLNANKFPVVIDWLSKGLIKPEKLITHTFDFQHVADAISLFELDQKHCCKVLLTFSE

SEQ ID NO: 11261 - protein, 140 aa, Brassica napus
  unsure (1)..(140): unsure at all Xaa locations
MASSMLSSAAXXTSPAQGTMVAPFTGLXSSAXFPXTRKXNNDITFXXSNGRXVXCMKXXXPVGXKKIENLSXLSXLTXMNXXKGXDXPFXXKXVSCXXIQMXHGXFXXXGXGXTPPILIGVLKGNFLGRADGGQKGKTKF

SEQ ID NO: 11262 - protein, 282 aa, Glycine max
MESKPHVLMHRYELGRLLGQGTFGKVYYARSTITNHSVAIKVIDKDKVMKTGQAEQIKREISVMRLARHPNIIQLFEVLANKNKIYFVIECAKGGELFNKVAKGKLKEDVAHKYFKQLINAVDYCHSRGVYHRDIKPENILLDENGNLKVSDFGLSALVDSKRQDGLLHTPCGTPAYVAPEVIKRKGYDGTKADIWSCGIVLFVLLAGYLPFHDPNLIEMYRKISKAELKCPNWFPPEVCELLGMMLNPNPETRIPISTIRENSWFKKGQNIKNKRPVENNT

SEQ ID NO: 11263 - protein, 181 aa, Acinetobacter sp. ADP1
MSQSIYHIPVQTISGQDTSLDTYRGKVLLIVNVASKCGLTPQYEGLEKLYQDKQQQGLEILGFPANNFLEQEPGSNDEIQQFCSLTYDVHFPLFGKISVAGEDKHPLYQTLIEAQPERIGEGPWWKDLVDYGLTPNPKPEVLWNFEKFLINKNGEVVARFAPDITADDPRLVDAINAELAK

SEQ ID NO: 11264 - protein, 442 aa, Mycobacterium avium subsp. paratuberculosis str. k10
MPALLWFRRDLRLHDHPALSAAADSDEVLACFVLDPRLQRSSGPRRLQFLGDSLRVLRDELDGRLLVTRGRPDIRIPEIAKAIGASSVHVSEDFTPFGKRRDARVRAALASVPLVATGSPYLVAPGRVTKPDGSPYQVFTPFLRRWRDTGWRPPVKTGAASARWLDPARLGITDCEIPDPGATLDLAAGEEAARNKWKSFVDNGLANYADDRHRPDIEGTSRMSAHLKFGTIHPRTLVADLDLRAAAARAYLRELAFRDFYADVLHHRPASAWRNWNSAFDAIRTDTGAEAGRRFAAWKAGETGFPFVDAGMRQLRQTGFMHNRVRMTVASFLVKDLHLPWQWGAHWFLQQLVDGDLANNQHGWQWCAGCGTDAAPYFRVFNPAAQGEKFDPSGDYIRRWVPELRCADDPHLRTGERPPGYPAPIVDHATERAEALRRYRSM

SEQ ID NO: 11265 - protein, 135 aa, Brassica napus
MGGGGRVMATAAKVAGIGVAKGGFRGGLGVPAAANDQFNVRSTSAAKPVSASLSSAIHPSAEADAMVLQRASWEDDWEFAEVETTTIPRVVFSKPPSLQEAKEATDDLKDAINLVYTEGSYEAGSVSRMLSSFHL

SEQ ID NO: 11266 - protein, 326 aa, Glycine max
  unsure (1)..(326): unsure at all Xaa locations
MEQSVLDDIINRLLEVRTRPGKQVQLSESEIRQLCVVSREIFLQQPNLLELEAPIKICGDVHGQYSDLLRLFEYGGLPPEANYLFLGDYVDRGKQSLETICLLLAYKIKYPENFFLLRGNHECASINRIYGFYDECKRRFNVRLWKTFTDCFNCLPVAARVDEKILCMHGGLSPDLNNLDQIRNLQRPTDVPDTGLLCDLLWSDPSRDVQGWGMNDRGVSFTFGADKVSEFLQKHDLDLICRAHQVVEDGYEFFANRQLVTIFSAPNYCGEFDNAGAMMSVDETLMCSFQILKPADKKAKLHXGSTTTAKPGNSPAGVKCFLGAKV

SEQ ID NO: 11267 - protein, 157 aa, Lactococcus lactis subsp. lactis Il1403
MNFYDFSAFKMNGETVSMSDFKGKVVIVVNTASKCGFTPQFEGLEKLYENYKDQGLEILGFPCNQFVNQDAGENSEINEFCQLNYGVTFPMFQKIKVNGKEAHPLYQFLKKEAKGALSGTIKWNFTKFLIDREGNVIERFAPKTEPKEMEEEIQKLL

SEQ ID NO: 11268 - protein, 183 aa, Pyrus pyrifolia
MASSMISSGTVATVSADRPAPAQARMVAPFNGLKSSSAFPVTRKSNDITSIASNGGRVQCMQVWPPLGLKKFETLSYLPPLSSESLAKEVDYLLRKNWVPCLEFELETGFVYRENHRSPGYYDGRYWTMWKLPMFGCTDSSQVLKELEEAKKAYPQSFIRIIGFDNVRQVQCISFIAYKPAGF

SEQ ID NO: 11269 - protein, 501 aa, Burkholderia cepacia R18194
METNEHFPLLDATRAFLAKPKKMLIGAEWSDAASGRQLDVVNPADGTVLARVPEADAHDVQQAVAAARRAFDAGPWRTAKTTDRERLLLTLADLIEANARELAEIESLDNGKPVMVAQGLDVAMAAQCFRYMAGWATKIEGSVIDAGMPYMPDSEIFTYTRKEPVGVVGAIIPWNFPLLMAAWKLAPALATGCTVVLKPAEDTPLSALRLGELIREAGFPDGVVNIVTGYGHTAGAALSSDPRIDKIAFTGSTQTGKTIGHAALDNMTRMSLELGGKSPVIVLPDVDPDKAALGVANAIFFNQGQVCTAGSRAYIHAKVFDDVIERVAKIAASLKIGPGMDPSTQIGPLVSAKQRQRVCGYIDSGFGEGARAAAGGRAVDGPGFFVEPTVLVDTTQAMRVVREEIFGPVLVAMPFDDVDTAVQLANDTPYGLGASIWSNDLSAIHKLIPRIAAGTVWVNCHSLLDNAMPFGGMKQSGFGRELGRAVIDQYTESKSVMMNYA

SEQ ID NO: 11270 - protein, 315 aa, Mesoplasma florum L1
MSAEFNWFPGHMNKTLKNIEEKIPVVDLVIEILDARAPYSSRNLTFSKILKNKPILYVLSKADIADPNITKEWVEFYEKKNNTVMVLDDKQKNIVKPLIDLINKATKEKQEKDKAKGMVNSLINVLVIGIPNVGKSTFINRLIKNKSVKAGNKPGLTRGIQLIHLSQFISLLDTPGVLPAKLENETVATNICAINSIKEDVYPKERVAGKLMQYLFNHYEGLIENHYKISPRLQRPIQITDTFIIFEMIAKVRKWYMNDDLLDYDRVIDAFMRDIIANEFNKVSFERILEVVPEEMEKASKIKNEKAIEDISDLW

SEQ ID NO: 11271 - protein, 429 aa, Methylococcus capsulatus str. Bath
MSNFAKLELNESVVEVPVIEGTEGEKAIDITKLRAQTGYITLDPGYGNTGSCLSAITFIDGEQGILRYRGIDIAELCEKSTFVEVSYLLIYGQLPTVEQYARFKEKIHHHSLIHEDMKSFFTSYPGHAHPMAILSSMVCSLSVYHPELLKPDQTIDERDETISRLLSKVRVLAAFAYKRSVGEAFVYTRPELDYISNFLHMMFTRPMRGYVPDELIRKVLDVLFILHADHEQNCSTSTVRMVGSSKANLFAAISAGICALWGPLHGGANQAVIEMLEEIHRAGGCYKKYIERAKDKNDPYRLMGFGHRVYKSYDPRAQILKKYCDEVLNYLGIDDPILEIAKGLEEVALTDPYFIERKLYPNVDFYSGIIYRALKIPTNMFTVMFALGRLPGWIAHWKEMLEDPGMRIARPRQIYIGERQRPYVPIAQR

SEQ ID NO: 11272 - protein, 321 aa, Hydrangea macrophylla
MAFTIPEVPLSSGGRKMPVLGLGTAADPPVDPETVRKAVTEALKLGYRHFDTAALYNSEQPLGDAIAEALGEGLIKSRDELFITSKLWCSDAHRENVEPALQKTLKNLKLEYIDMYLIHWPVSSKPGNYEYPIKKEDFLQMDYKSVWEAMEECQKLGLTKAIGVSNFSCKKLSDVLANAKVPPAVNQVEVNPCWQQKQLTEFCKSNGILVVAYAALGAVGTFYGTNRVMGSEVLNEIARIRGNTVAQVCLRWAYEQGIGVLVKSFNKERMEQNLQIFNWTLSDDESKKISEIPQGRACLGTDYTSVHGPFKTIEELWDGEF

SEQ ID NO: 11273 - protein, 161 aa, Paxillus involutus
VVLIGDSGVGKSNLLSRFTRNEFNLDSKSTIGVEFATRSINVDSKTVKAQIWDTAGQERYRAITSAYYRGAVGALLVYDISKHATYVNVTRWLKELRDHADSNIVIMLVGNKSDLKHLRAVPTEEAKNFSAENELSFIETSALDASNVESAFQTILTDVYR

SEQ ID NO: 11274 - protein, 324 aa, Hydrangea macrophylla
MASNYSNIPEVSMSSSSRKIPIVGLGTATFPPVGSKTVVAAVLQAIQIGYRHFDTASVYQTESDLGEAIAEALRLGLIKSREELFTTSKLWCSDAHAQHVVPTLQKTLKNLNLDYLDLYLVHWPVSVKHGTYDYPIKTEDIIPMDYESVWGAMEECHKLGLAKAIGVSNFSCKKLGHLLSFAKIPPAVNQVEMNPVWQQRKLVEFCKENGVLVGAFSPLGALGTSWGSNNVMESEILKEIAKAKGKTVAQVSLRWAYEQGVIVLVKSYRAERMQENLGIFDWELSDEDTKKIREIPQRRVHRGEEFISENGPFKSIEEFWDGEL

SEQ ID NO: 11275 - protein, 162 aa, Zea mays
LQAVIKRLMTDVPFGVLLSGGLDSSLVASVASRHLNETKVDRQWGNKLHTFCIGLKGSPDLKAAREVADYLSTVHHEFHFTVQEGIDALEEVIYHIETYDVTTIRASTPMFLMSRKIKSLGVKMVISGEGSDEIFGGYLYFHKAPNKKEFHEETCRKVKIFL

SEQ ID NO: 11276 - protein, 161 aa, Paxillus involutus
VVLIGDSGVGKSNLLSRFTRNEFNLDSKSTIGVEFATRSISVDGKTVKAQIWDTAGQERYRAITSAYYRGAVGALLVYDISKHATYVNVTRWLKELRDHADSNIVIMLVGNKSDLKHLRAVPTEEAKNFSTENELSFIETSALDASNVESAFQTILTDVYR

SEQ ID NO: 11277 - protein, 165 aa, Oryza sativa (japonica cultivar-group)
MSSEQQASAGQPVLCASGCGFYGNPATLDMCSVCYRQHCLLNGATMATGPSSSVAAASAATVATGAVTSDSCSVPSAEVNGAAFSSKNNPEPATVVEKKAPANRCASCKKKVGLLGFACRCGATYCGTHRYPEKHACGFDFKGASRDAIARANPLIKGEKLTNKI

SEQ ID NO: 11278 - protein, 283 aa, Triticum aestivum
  unsure (1)..(283): unsure at all Xaa locations
MSVVSLLGVNVLQNPARFGDPYEFEITFECLETLQKDLEWKLTYVGSATSNDHDQELDSLLVGPIPVGVNKFIFVADPPDTNKIPXAEILGVTVILLTCAYDGREFFRVGYYVNNEYDSDELNTDPPAKPILEKVRRNILAEKPRVTRFAIKWDSDDSAPPLYPPEQPEADLVADGEEYGAEEAEDEDEEESADGPEVPADPDVMIDDSEAAGAMVETVKATEEESDAGSEDLEAESSGSEEDEIEEDEEREDEPEEAMDLDGAGKRNAAISSSNNTDTTMAH

SEQ ID NO: 11279 - protein, 170 aa, Campylobacter jejuni subsp. jejuni NCTC 11168
MKNNPYIIWLTGLAGSGKTTIGQALYEKLKLKYKNLIYLDGDELREILGHYAYDRQGRIDMALKRAKFAKFLNDQGMMVIVTTISMFNEIYDYNRKQLKNYYEIYIECDMHELIQRDQKGLYTKALNKEIDNVVGVDIEFDKPEADLVINNSCRNNLEEKVELIIKKLAL

SEQ ID NO: 11280 - protein, 489 aa, Burkholderia fungorum LB400
MPEVARFLDAGPLGGVIDGRDEQAADGATFETLDPGTGEHLATVAAMGPADVDRAVDAARRAFARSGWATMHPNDRAIWLHRLADEVERRKAIIGQIEALDAGKIEQQAQGDVQSFVDTLRYFNELALNTERRSALPVSGYEAWTTRQPWGACGFIVPWNFPMVLIGWNISPALAAGNTVVIKPAEDTPLSAIYLARLAREIGFPDGVINVVTGLGEIAGAALSRHPGLRRMSFTGSPEVGRMVAEACGRNLVPCKLELGGKGAAVIFDDVNIEETADKLARAITFHTGQVCCDATRWLVHESIFERFVDASVAALQRTKIGYQLDPGAEMGPVVSAKQRERVLGYLERGQRDGARAVLKGGAVDVAGHDGFYVSPALLAGSLENVAAREEIFGPVAFLAPFRDEAQAVELANDTDYGLANSVWSHDPRRASRVAEAMVAGNSWINAHNLFPLGVPYAGVNRSGMGGGVNSVETLFDYWRSQSMVRPTR

SEQ ID NO: 11281 - protein, 511 aa, Oryza sativa (japonica cultivar-group)
MAMPCRLHGDILLLLLGAVAVAVAHPAANEFCAAVGGGSGGCGVGGGGGGDGRRILIRGGTVVNAHRVEEADVYVEDGVIVAVRPNIPVGDDHVKVIDATGKYVMPALAGGTTMHIDFVIPVNGNLTAGLESYKQKAEKSAMDYGFHMAITKWNDDVSREMETMVKEHGINSFKFFMAYKGSLMVTDDLLLQGLQKCKSLGALAMVHAENGDAVAEGQQRMIDLGITGPEGHALSRPPVLEGEATARAIRLAKFVNTPLYVVHVMSIDAMDEIAKAKREGQRVIGEPVVSGLVLDDSWLWDPDFMIASKYVMSPPIREAGHNKALQVALSSGILQLVGTDHCTFNSTQKAFGSDDFRKIPNGVNGIEERMHIIWDSMVETGRISVSDYVRVTSTECAKIFNIYPRKGAILEGSDADIIILNPERSFVMGAHTHHSRSNTNVYEGRKGKGMVEVTISRGRVVWEDGILNVVPGSGRYVRTPPYSYLFDGIEKSDAAYRASLRAPVKRGKAAA

SEQ ID NO: 11282 - protein, 371 aa, Saccharomyces cerevisiae
MFRSVATRLSACRGLASNAARKSLTIGLIPGDGIGKEVIPAGKQVLENLNSKHGLSFNFIDLYAGFQTFQETGKALPDETVKVLKEQCQGALFGAVQSPTTKVEGYSSPIVALRREMGLFANVRPVKSVEGEKGKPIDMVIVRENTEDLYIKIEKTYIDKATGTRVADATKRISEIATRRIATIALDIALKRLQTRGQATLTVTHKSNVLSQSDGLFREICKEVYESNKDKYGQIKYNEQIVDSMVYRLFREPQCFDVIVAPNLYGDILSDGAAALVGSLGVVPSANVGPEIVIGEPCHGSAPDIAGKGIANPIATIRSTALMLEFLGHNEAAQDIYKAVDANLREGSIKTPDLGGKASTQQVVDDVLSRL

SEQ ID NO: 11283 - protein, 495 aa, Burkholderia cepacia R18194
MRAQNKFKTGLDIAKYTAKIMRADMAAYDADPAKYTQSLGCWHGFIGQQKMISIKKHFNSTERRYLYLSGWMVAALRSEFGPLPDQSMHEKTSVSALIRELYTFLRQADARELGGLFRELDAAKDATAKAAIQDKIDNHVTHVVPIIADIDAGFGNAEATYLLAKQFIEAGACCIQIENQVSDEKQCGHQDGKVTVPHEDFLAKIRAIRYAFLELGVDDGIIVARTDSLGAGLTKQIAVTSTPGDLGDQYNAFLDCEELSADQLGNGDVVIKRDGKLLRPKRLPSNLFQFRAGTGEARCVLDCITSLQNGADLLWIETEKPHIAQIGGMVSEIRKVIPNAKLVYNNSPSFNWTLNFRQQAYDALKAEGKDVSAYDRAQLMSVEYDETELAKLADEKIRTFQADAAREAGIFHHLITLPTYHTAALSTDNLAKEYFGDQGMLGYVAGVQRKEIRQGIACVKHQNMSGSDIGDDHKEYFSGDAALKAAGKDNTMNQF

SEQ ID NO: 11284 - protein, 73 aa, Brassica napus
MAFPSCVQCGTRQNPCRCKVVGPTLGFVAFLVTGVIEWPVGAVVYIFKHSKGRRIMGHPATVVYPKVSRSIPI

SEQ ID NO: 11285 - protein, 490 aa, Saccharomyces cerevisiae
MEATSSALSSTANLVKTIVGAGTLAIPYSFKSDGVLVGVILTLLAAVTSGLGLFVLSKCSKTLINPRNSSFFTLCMLTYPTLAPIFDLAMIVQCFGVGLSYLVLIGDLFPGLFGGERNYWIIASAVIIIPLCLVKKLDQLKYSSILGLFALAYISILVFSHFVFELGKGELTNILRNDICWWKIHDFKGLLSTFSIIIFAFTGSMNLFPMINELKDNSMENITFVINNSISLSTALFLIVGLSGYLTFGNETLGNLMLNYDPNSIWIVIGKFCLGSMLILSFPLLFHPLRIAVNNVIIWIEITYGGANPEEDPQVSEYTRASNLRPISMTVEDPAQPSDALDATSYNEQECLLPNGNFDNGSIESQENNNDERGTMAVAGDNEHHAPFVKSRFYWITALLLISMYTLALSVQSFALVLSFVGATGSTSISFTLPGLLGYKLIGLDSLAIGKMIPPKDRFYKRCSLLLVFYGLSVMFLSLYVTVFNRSDEA

SEQ ID NO: 11286 - protein, 449 aa, Zea mays
MYRAKRAALSPKVKRRVGKYELGRTIGEGTFAKVRFAKNTENGEPVAIKILDKEKVKRHRLVEQIKREICIMKLVRHPNVVRLFEVMGSKARIFIVLEYVTGGELFEIIATNGRLKEDEARKYFQQLINAVDYCHSRGVYHRDLKLENLLLDAAGNLKVSDFGLSALTEQVKADGLLHTTCGTPNYVAPEVIEDGGYDGATADIWSCGVILFVLLAGYLPFEDDNIIALYKKISAAQFSCPSWFSAGAKNMITRILDPNPTTRITISQILEHPWFKKGYKPPVFDEKYQTSLDDVDAAFGDSEDRHVKEETEDQPTSMNAFELISLNQALNLENLFEAKEEYKRETRFTSQCPPKEIITKIEEAAKPLGFDVQKKKYKMRMENPKAGRKGNLNVATEVFQIAPSLHVVELKKAKGDTLEFQKFYRSLSTQLKDVVWKCDGEVDGNSAAA

SEQ ID NO: 11287 - protein, 619 aa, Zea mays
  unsure (1)..(619): unsure at all Xaa locations
MDSDYGVPRELSEVQKKRTLYQPELXPPCLQGTTVRVEYGDAAIAADPAGAHVISHAFPHTYGQPIAHFLRKTAVVPDAKVISEHQAVRVGIVFCGRQSPGGHNVVWGLYEAIKAHNQNSKLIGFLGGSDGLLAQRTLEITDKVIASYKNQGGYDMLGRTKDQIRTTEQVNGAMASCQALKLDALVIIGGVTSNTDAAQLAETFAEAKCATKVVGVPVTLNGDLKNQFVETTVGFDTICKVNAQLISNVCTDALSAEKYYYFIRLMGRKASHVALECALQSHPNMVILGEEVAASKLTIFDITKQICDAVQARAEKDKNHGVILIPEGLVESIPELYALLQEIHGLHGKGVSVENISSQLSPWASALFEFLPPFIRKQLLLHPESDDSAQLSQIETEKLLAQLVETEMNRRLKEGTYKGKKFNAICHFFGYQARGALPSKFDCDYAYVLGHVCYHIIAAGLNGYMATVTNLKNPVNKWRCGATPISSMMTVKRWSRGPSATQIGKPAVHMASVDLKGKAYDVLRQNSSSFLLEDVYRNPGPLQFEGPGADSKPISLCVEDQDYMGRIKKLQEYLEKVKRIVKPGCSQDVLKAALSAMSSVTETLNIMTSSSTGQTPLSH

SEQ ID NO: 11288 - protein, 318 aa, Burkholderia cepacia R18194
MLEPEIAAFVAAVDAWYPADAAARSPGEQRRLYDRFAAEWTPAALPAGIVQQDAVWHAPDGHKIALRRYTSAHGTPRGTVLFFHGGGFVVGSLDSHALITAQLAADTGLDVIAVDYRLAPEHRAPAALEDCLDVTRAARDARWPFGPCVHPLTLAGDSAGGMLAAAVVTALRDAGEGGIDGIALVYPMLGFEPQSPARETEAHAPMLTLDDVHRYRALYWEGGLSDALGDGNPLLHASVPLAASRFDGLPPVLAIGAEHDPLRDDARVYVERIRAARGVAHYWMGEGLVHGCWRALGTSPQAALMHRTVGGFLLAPHA

SEQ ID NO: 11289 - protein, 164 aa, Brassica napus
MPALACVDTYTTDVFIPPSPQPSSTAAVVDTWSPSLSSSLYRIDGWGAPYFSANSSGNISVRPHGSNTLPHQDIDLLKLVKKVTDPKQTGGLGLHLPVIVRFPDVLKNRLECLQSAFDFAVQSQGYESHYQGVYPVKCNQDRFVVEDIVRFGSQFRFGLEAGSN

SEQ ID NO: 11290 - protein, 181 aa, Brassica napus
MASSMLSSAAVVTSPAQATMVAPFTGLKSSSAFPVTRKANNDITSIVSNGGRVSCMKVWPPVGKKKFETLSYLPDLTEVELGKEVDYLLRNKWIPCVEFELEHGFVYREHGSTPGYYDGRYWTMWKLPLFGCTDSAQVLKEVQECKTEYPNAFIRIIGFDNNRQVQCISFIAYKPPSFTGA

SEQ ID NO: 11291 - protein, 164 aa, Methylococcus capsulatus str. Bath
MNIYEFEVRTLEGETVRLDGYRGKVLLIVNVASRCGFTPQYAGLEALYRRHRNAGLVILGFPCNQFGGQEPGSETEIRRFCSSRYEVSFPLFAKIEVNGEHTHPLYAYLKSAQPGLLGSEAIKWNFTKFLVGRNGEVVKRYAPTATPESIEPGLLPLLTVGSGG

SEQ ID NO: 11292 - protein, 370 aa, Zea mays
  unsure (1)..(370): unsure at all Xaa locations
MRRRRMGALHVVGEPRISFRQQPAAVVAKNGGHGAVVEEIHGLIRVYKDGHVERLPAIPAVPCTWGGTAPGRAGRXVARDVVVDPATGVWARLYAPTSAGDGARRPVVVYFHGGGFCVGSAAWSCYHEFLAQLAARAGCAVMSVDYRLAPEHRLPAAFDDGLAAVRWLRHQAAASASASACCNDDLSWWRARCGFDRVFLMGDSAGASIALHVAARLGQGQLGALPPLTVRGPVLIQPFLGGEGRTASEKNVAQPPRSALTLATSDCYWRLALPAGASREHPWCNPLSGRAAPRLETTPLPPLLVCVSETDILRDRNLELCRALREAGKRVEQAVYGGVGHAFQVLHNCHLSQPRTQEMLAHIKAFVSAR

SEQ ID NO: 11293 - protein, 432 aa, Chromobacterium violaceum ATCC 12472
MTTREQRIAAIQKDWDENPRWKGIKRGYSAADVERLRGSLQVEHSLARHGAEKLWQLVNNEPYINCLGALTGGQAMQQVKAGVKAIYLSGWQVAADNNEYSAMYPDQSLYPVDSVPKVVERINNAFTRADEIQHAKGLDKGDKGYVDYFAPIVADAEAGFGGVLNAYELMKAMIRAGAAGVHFEDQLASVKKCGHMGGKVLVPTQEAIQKLIAARLAADVYGVPTLVIARTDAEAADLLTSDVDPNDEPFLTGERTAEGFYKTKKGLEQAISRAVAYADYADLVWCETGTPDLEFARKFAEAVHAKHPGKLLAYNCSPSFNWKKNLDDATIAKFQRELGAMGYKYQFITLAGIHSMWFNMYDLAQDYVARGMSAYVEKVQEPEFAARDRGYSFVSHQQEVGTGYFDDVTTVIQGGTSSVTALTGSTEEEQFH

SEQ ID NO: 11294 - protein, 531 aa, Zea mays
  unsure (1)..(531): unsure at all Xaa locations
MPGILYQLVVAAAICALSSGSIAVASGLNATDSFLVCLVGAGVPPRLLQTPASPSYSATLLSSVRNLRYVTSDIQRPVAIVAATEPAHAQAAVRCGRRHGVRVRARSGGHDYEGLSYASLDPRERFAVLDLAAFRDVRVDSARAEAWAGSGATLGEVYYAVAAASRVLAFPAGICPTVGVGGHLSGGGFGTLMRRYGLAADNVIDAVLVDADGRLLNRTTMGEDLFWAIRGGGGESFGVILSWKLRLVRVPETVTVFTVRRSINQSASQLITKWQAIAPALPSDLILRVAVRSQPARFEALFLGXAARLLEHMRAHFPDLGVTQSDCEEISWIQSTVYFAFYSSSKPLELLLDRSGETPRYVKAKSDYVQEPIPRHVWERTWSWLEKPEAGLLILDPYGGRMGSISPSATPFPHRKGNLYNLQYYSYWFENGTAALEKRMSWVRGLYEEMEPYVSKNPRTGYVNYRDLDLGTNELEDNVTSYARARIWGEKYFKGNFERLAAVKAMADPDDFFRNEQSIPPLPAAKGWGFI

SEQ ID NO: 11295 - protein, 205 aa, Triticum aestivum
GVSKVLLLLSAYLDHKVQENEELLDSSKTKAARGIFHGQRVPELSIKLYAERIFKYAKCSPSCFVLGLIYIERYLQQPNIYMTSFSVHRLLIASVVVAAKFIDDAFFNNAYYGRVGGITTREMNMLELDLLFSLDFRLKVDIETFGSYCLQLEKEALVLVLERPIQVQAANVTKHLICNSSADETCKHELVRERYSSQAVHGCSW

SEQ ID NO: 11296 - protein, 368 aa, Malus x domestica
MGKGGQSCNGVVRDAKPVEQENMAAWLVDVNTIKILPFKLPAIGPNDVRIRIKAVGICGSDIHYLKTMKCGDFQVKDPMVIGHECAGIVDKVGSEVKHLVPGDRVAVEPGISCARCQQCKGGRYNLCPDMKFFATPPVHGSLANQIVHPADLCFKLPENVSLEEGAMCEPLSVGVHACRRANVDPETTVLIIGAGPIGLVSVLAARAFGAPRIVIVDMDDKRLAMAKSLGADEAVKVSTKMEDLDDEVAEIKEAMISEVDVTFDCVGFNKTVSTGLNATRPGGKVCLVGMGHGVMTVPLTPAAAREVDVVGVFRYQKTWPLCLEFLRSGKIDVKPLITHRFGFTEKEVEEAFATSARGGNAIKVMFKL

SEQ ID NO: 11297 - protein, 245 aa, Zea mays
MDKPVAPGIIKEELLEQQPPTQDGVGGGGDAPRPMEGLHEVGPPPFLTKTFDLVEDPATDAVLSWSRAGNSFIVWDPHVFADGLLPRLFKHSNFSSFVRQLNTYGFRKVDPDRWEFANEGFLRGQRHLLKMIKRRKPPSAVAPLRQQRAPASCLEVGEFGFEEEIDRLKRDKNILITEVVKLRQEQQSTKDHVRAMEERLRVAEQKQVQMMGFLARAMRNPEFFQQLAQQQDKRKELEDTKKKKK

SEQ ID NO: 11298 - protein, 200 aa, Nicotiana tabacum
MAFAGTTQKCMACDKTVYLVDKLTADNRIYHKACFRCHHCKGTVKLGNYNSFEGVLYCRPHFDQLFKQTGSLDKSFEGTPKIVKPQKPIDSEKPQVAKVTSMFGGTREKCFGCKKTVYPTEKVSANGTPYHKSCFQCSHGGCVISPSNYTAHEGRLYCKHHHIQLIKEKGNLSKLEGDHEMNSTTTTEVTAESYTADQVD

SEQ ID NO: 11299 - protein, 488 aa, Pseudomonas fluorescens PfO-1
MIQTETDMQLIWLRSDLRQHDNTALAAAAERGPSVAVYLLSPQQWQEHDDAPCKIDFWLRNLHKLSKSLGDLNIPLLIRTAPHWDQAPAVLLELCRQLKIEAVHVNEEYGINESRRDAAVAKALQAEGITFHSYLDQLLFKPGSVLTRTGTYFQVFSQFRKVCYEHLHRSMPSLKQAPGKQSALNIASDPVPEAIEGFPTPGASLRALWPAGETEARRRLDTFADAQIDYYKSERDFPAKPGTSQLSAYLAAGVISPRQCLHAALQSNQGEFESGKVGAVTWINELLWREFYKHILVGYPRVSRHRAFRPETEDLAWRNAPEDLAAWQEARTGLPIIDAAMRQLLETGWMHNRLRMVVAMFLTKNLLIDWREGERFFMRHLIDGDLAANNGGWQWSASTGTDSAPYFRIFNPVSQSEKFDSEGLFIKHWLPELAGLNKKEIHNPASVGGLFGVADYPAPIVNLSASRERALAAFKNLPSRSSQGESDE

SEQ ID NO: 11300 - protein, 303 aa, ASPERGILLUS NIDULANS FGSC A4
MEETRVNLLEYLRSKTQVDLDTFDITGISFPRLLEHTLNLETVAAGLHDQFPEVTFDELGVEVGAVLLAGEMVPAFTGNLHLMVNPSYAYSREKVIEAAKSTPSPISLYPVLPATWEGLQACRDLQAFKIKTLGTTLFSMEQAILAGEAGCVSISPFVHSLRILVDPEYKDPHPVYNLSAQAQRWYRRQSLPTKVKSCSTVGVDELLELAGIDALTIIPDDLRALQSTYRDANQVFKLSIVENGTQNDDKIEHISYINDEEKYRADFQKADEGRAKAKTAEAIDIFCGFQAKAEDVIRKAKGQ

SEQ ID NO: 11301 - protein, 119 aa, Ehrlichia canis str. Jake
MIQKNTLLDVADNSGARKVLCIGLLNGKKSASVGDVIVVSTKVITPRGKVSKGKVYKAVVVRVKKAVRRLDGSIIRFSSNAVVLINDQGDPLGTRVFGPIKKLPFGLFSKVMSLAVEVL

SEQ ID NO: 11302 - protein, 232 aa, Brassica napus
PRVRLRSSFRLLYITRTNLLVRASPSSLSRLPSKFTSAKQLVRSHHQIPLSTTGAKLSRSEHSMAASSEPKSIYDFTVKDAKGNDVDLSTYKGKVLLIVNVASQCGLTNSNYTELAQLYQKYKDHGFEILAFPCNQFGNQEPGSNEEIVQFACTRFKAEYPIFDKVDVNGDSAAPIYKFLKSSKGGLFGDGIKWNFAKFLVDKDGNVVDRYAPTTSPLSIEKDLKKLLGVTA

SEQ ID NO: 11303 - protein, 363 aa, Buchnera aphidicola (Schizaphis graminum)
MKKKFRIAVLPGDGIGPEVMREAYKILNILERKFFLKLELREFDIGGIAIDREGIALPEKTLRGCENSDAILFGSVGGKKWDYLPIESRPERASLLPLRKHFNLFSNLRPAKLRVDLKNLSPLRSDIVRDGFDILCIRELTGGIYFGKPKGRFKNKNGEYAFDTEIYYDFEIERIANLAFELASSRRCKVCSIDKANVLESSVLWREIVKKVSKNYPDVHLSHLYIDNACMQIIKNPTQFDILLCSNIFGDIISDECAMITGSIGMLPSASLNNQKFGLYEPAGGSAPDIEGKNIANPIAQILSLSMLIRYSMNLNEIADKIDLSVHYALKEGYRTLDISDGKNYIKTNEMGDIIAEFLDNGK

SEQ ID NO: 11304 - protein, 386 aa, Aspergillus niger
MATATVLEKANIGVFTNTKHDLWVADAKPTLEEVKNGQGLQPGEVTIEVRSTGICGSDVHFWHAGCIGPMIVTGDHILGHESAGQVVAVAPDVTSLKPGDRVAVEPNIICNACEPCLTGRYNGCENVQFLSTPPVDGLLRRYVNHPAIWCHKIGDMSYEDGALLEPLSVSLAGIERSGLRLGDPCLVTGAGPIGLITLLSARAAGASPIVITDIDEGRLEFAKSLVPDVRTYKVQIGLSAEQNAEGIINVFNDGQGSGPGALRPRIAMECTGVESSVASAIWSVKFGGKVFVIGVGKNEMTVPFMRLSTWEIDLQYQYRYCNTWPRAIRLVRNGVIDLKKLVTHRFLLEDAIKAFETAANPKTGAIKVQIMSSEDDVKAASAGQKI

SEQ ID NO: 11305 - protein, 384 aa, Chloroflexus aurantiacus
MARKHPYEPLPWNDLPSVSWNFVWREPIGVCAQIIPWNYAFCMAAWKLGPALATGNTVVFKPSSLAPLSTLAIFQTIHDLNLLPKGVINLVLGPGGDVGEYLVTHPAVDKVAFTGSTEVGRKIMALAAPHIKRVTLELGGKNAMLILPDADLDLVVDGVLWGAFYHSGQLCEAGSRLLVPHALHDTLVERLVERVRGMRIGDPMDLETDIGPLISERQREKVEYYIAVGREEGATVVIGGGRPIGEAFANGHYVEPTIFTGVRPEMRIAREEIFGPVLSVIAYDEIGEAIRIANDSIYGLAASVWSRDLQHALSVVRRIRAGTVWINEHHVLNPRAPFGGYRQSGFGREMGRYGLDEYTEVKHIHVDLMQRRQGRLWWDTLLPE

SEQ ID NO: 11306 - protein, 476 aa, Pseudomonas syringae pv. syringae B728a
MYPDVQLYIDGQWRASRDNRTLSVINPATGEALGAVAHAGIADLDEALAAAERGFATWRATSAYDRYKLMQKAANLVRERADSIARIMTQEQGKPLAEARMETLSAADIIDWLAEEGRRSYGRLVPSRNVSIEQKVIKEPVGPVAAFTPWNFPINQVVRKLSSALAAGCSIIVKAPEETPASPAELIRAFADAGVPAGVIGLVYGDPAEISGYLIPHPVIRKVTFTGSTPVGKQLAALAGKHMKRATMELGGHAPALVFDDADIDLAARVLATAKFRNAGQVCVSPTRILVQRKVLDAFTEKFVGLTREIKVGNGLEAGTTMGPVANDRRIPALVDLIDDAVRGGATLSAGGKAGEGPGYFFEPTVLSGLKPHMRIMNEEPFGPVALLVPFDTLEEAIAESNRVPFGLASYAFTTSMKTAQALSTYIEAGMLSINHQGIGLPEVPFGGIKDSGYGSEGGTEAIEAYLNTKLVTQYN

SEQ ID NO: 11307 - protein, 245 aa, Glycine max
  unsure (1)..(245): unsure at all Xaa locations
MTSASELFHSRRHRLGRSALDLGLDTELNAADSLRRHYHLRRLRHHPGAXASDRIDGRNLREMSIRFFDSEENVRSSLRGSDSERLPVGVVLARARLLQRLRGEPLSTNRQYDRDSFGEDPESESSNEDPSGASLVTELTSQMARSQFLQELSTKPPGLTQEALDCLHQEVFSSNASEIGLDSRVLQDCSICLESFTDGDELIRLPCGHKFHSVCLDPWIRCCGDCPYCRRCIVVNTHSSLNEDE

SEQ ID NO: 11308 - protein, 72 aa, Brassica napus
  unsure (1)..(72): unsure at all Xaa locations
MDPMDIVGKSKEDASLPKATMTKIIKEMLPADVRVARDAQDLLIECCVEFINLISSESNEVCNXEDKRTIAP

SEQ ID NO: 11309 - protein, 388 aa, Zea mays
MHSDERLFYKLLIDNVVELLPFVYTPTVGEACQKYGSIFGRPQGLYVSLKDKGKVLEVLRNWPHRNIQVICVTDGERILGLGDLGCQGMGIPVGKLALYTALGGVDPSVCLPITIDVGTNNEKLLNDEFYIGLRQKRATGEEYDELIEEFMSAVKQFYGEKVLIQFEDFANHNAFDLLEKYSKSHLVFNDDIQGTASVVLAGLLAALKMVGGTLAEQTYLFLGAGEAGTGIAELIALEISKQTNAPIEECRKKVWLVDSKGLIVDSRKGSLQPFKKPWAHEHEPLKTLYDAVQSIKPTVLIGTSGVGRTFTKEIIEAMSSFNERPIIFSLSNPTSHSECTAEQAYTWSQGRSIFASGSPFAPVEYEGKTFVPVHAYMIYICCNVVKAN

SEQ ID NO: 11310 - protein, 341 aa, Chromobacterium violaceum ATCC 12472
MKALAKLKAAPGLEMTDVPLPEVGHNDLLIKIVKTAICGTDIHIWNWDEWSQKTIPVPMHVGHEYVGVVAGMGSEVQGFKIGQRVSGEGHITCGYCRNCRAGRRHLCRNTTGVGVNREGAFAEYLVIPAFNAFPIPDDISDDLASIFDPFGNAVHTALSFNLVGEDVLITGAGPIGIMAVAIAKHVGARHVVITDVNDYRLELAKKMGATRAVNVAREDLKAVMQELHMSEGFDVGLEMSGNPQAFRQMLETMNHGGKVALLGIPPSNTAIDWNQVIFKGLEIKGIYGREMFETWYKMVALIQSGLDISPIITHHFKVDEFEQGFAAMLSGQSGKVILDWR

SEQ ID NO: 11311 - protein, 405 aa, Zea mays
MKPPSLVHCFKLLVLLALARLTMHVPDEDMLSPLGALRLDGHFSFHDVSAMARDFGNQCSFLPAAVLHPGSVSDIAATVRHVFSLGEGSPLTVAARGHGHSLMGQSQAAQGIVVRMESLRGARLQVHDGFVDAPGGELWINVLRETLKHGLAPKSWTDYLHLTVGGTLSNAGVSGQAFRHGPQVSNVNQLEIVTGRGDVVTCSPEDNSDLFYAALGGLGQFGIITRARIALEPAPEMARWIRVLYSALESFTEDQEMLIMAENSFDYVEGFVIINRTGVLNNWRASFKPQDPVEASHFQSDGRVLYCLELTKNFNSDDTDTMEQEVTVLLSRLRFIQSTLFHTDVTYLEFLDRVHTSELKLRAQGLWEVPHPWLNLLIPRSSIRRFAKEVFGMTLNDSNNGSILL

SEQ ID NO: 11312 - protein, 490 aa, Novosphingobium aromaticivorans
MGVTIPPLERSDFLTGQPLVDGTEICAGSTYAVTNPATGKTLANVVKLGAAQTRRAIESNSRALIDWRKRPAQERARLLHDWLALVRLHRHDLGLLMTAEQGKPLAEALGEVDYAASFIQWFAEEARRVYGEVIPASADRRIVVIRQPVGVAGAITPWNFPAAMITRKVAPALAAGCTVTLKPSELTPMTAFALAKLAREAGVPPGVFNVVCGDAPEIGSVLTSHPDVTKFTFTGSTAIGKLLTAQCAATLKRVSMELGGNAPLLVFDDADLDQAVEGAIASKFRNTGQTCVCANRILVQSGIHDRFVEALAARVSAFRVGNGLEGATDQGPLITASALAKVQGHVADAVAQGAQLVTGGKRHEAGELFFQPTVLTGARPAMRLADEETFGPVAPVFRFETEAEALALANATHSGLAAYAFTRDIDRAWRVSEGLETGMVGLNSGIVSTETAPFGGIKESGLGREGSRHGIEEFLEMKTISVGVRPESPV

SEQ ID NO: 11313 - protein, 361 aa, Yarrowia lipolytica
MRLAIQAVFLLATLMWLVAAQADFYAVLGLKKGASDKDIKKAYRTLSKKYHPDKNPRNEEAHQTFIEIGEAYEVLSDEEKRGKYDKFGHEGLKNGGGGGTNPFDLFAQFFGGGGGGQRRGVPKGPNTETHIDVSMKRMFKGFDMDLQVNLQGICSSCKGSGSADGVNHKCDGCDGSGVVIQVAQMGMMIQKFQQQCPKCQGKGHLISNPCNKCGGQKVQREDRKYNVYIEPGTPRVHSYSFEEEADKSPDHVAGDLIVQVREAPTENMGYRRRRNDLFRTEALSLKEALHGGWTRKIPFLDEESEVVLSRKKGEPTQHGHIEVIKNHGMPQMGVDDSHGDLYIKYVIVMPMGASSKVRDEL

SEQ ID NO: 11314 - protein, 239 aa, Methanococcus maripaludis S2
MARTKKANDEVATDSDSLKLKVAKQAAKLVKDEMVVGLGSGSTANLFIQELGKRVVEEELYIYGVPTSFDSRMMASNSGIPLISLDQCGEIDIAIDGADEVCKKTLSLIKGGGGCHTMEKIVDYHAKEFVVLADEGKLVESLGDKTAVPLEVIPFAYSTVLNKLLDMNTAPAIRSGSGKMGPVITDNGNMIIDVFINIEDAEETETMLNNIPGVLENGIFSKCDKVLVGTSKKVEILKK

SEQ ID NO: 11315 - protein, 162 aa, Dechloromonas aromatica RCB
MKRRFLIALFIFGSFFGSTAALADAATEAATAADPVAEKRLQKLSEELRCLVCQNQTIADSNAELAQDLRREVRTMIKDGKTDKEIVDFMVVRYGDFVLYRPPVKGITLLLWGGPIVLMLLGLFMLQRYLRRRSTRIDAEDQPLSADDASRADALLKENDQK

SEQ ID NO: 11316 - protein, 291 aa, Saccharomyces cerevisiae
LVHVASVEKGRSYEDFQKVYNAIALKLREDDEYDNYIGYGPVLVRLAWHISGTWDKHDNTGGSYGGTYRFKKEFNDPSNAGLQNGFKFLEPIHKEFPWISSGDLFSLGGVTAVQEMQGPKIPWRCGRVDTPEDTTPDNGRLPDADKDAGYVRTFFQRLNMNDREVVALMGAHALGKTHLKNSGYEGPGGAANNVFTNEFYLNLLNEDWKLEKNDANNEQWDSKSGYMMLPTDYSLIQDPKYLSIVKEYANDQDKFFKDFSKAFEKLLEDGITFPKDAPSPFIFKTLEEQGL

SEQ ID NO: 11317 - protein, 479 aa, Novosphingobium aromaticivorans
MTQIEHWIGGTAVAATGGAYFDDLNPVDDSVYSRVPAGTAEDVNRAVENAHQAYLQHRDLPAAVREGWIAKAAEIMERDTAKFADVLVDEIGSPIAKAGFETRFAVSFLRAAIGVPRRIRGETIPSDTPGRFSMSLRQPVGVVAGITPFNVPLIKGIKQSAMALATGNAFVLLPSEAAPMIADLLAKLWKEAGVPDGLFNVVYGNGAEIGDVLTGHPKVASITFTGSSRVGKHIAEIAARNLKKYTLELGGKSPLVICADADLDKAVNAALFSIFMYQGQVCMGASRIYVERSIFDQFTKAFAAATGRANSGDLRDPTTMLGPIISERQRDRVRRHIDDARSKGAAVLAGGEWSGNSCAATILSGVTAEMTVFEEETFGPVTSLFPFDTLEEALELANNTEYGLSASIFTRDLDKALAFAQRAEAGMVHINAPTLHDEPHVPFGGTKASGFGREGTEADLEIMTEWKWVTIQSATEGGH

SEQ ID NO: 11318 - protein, 336 aa, Bacteroides thetaiotaomicron VPI-5482
MRIGILTSGGDCPGINATIRGVCKTAINHYGMEVIGIHSGFQGLLTKDIESFTDKSLSGLLNQGGTMLGTSREKPFKKGGVVSDVDKPALILQNIQEMGLDCVVCIGGNGTQKTAAKFAAMGVNIVSVPKTIDNDIWGTDISFGFDSAVSIATDAIDRLHSTASSHKRVMVIEVMGHKAGWIALYSGMAGGGDVILVPEIPYNIKNIGNTILERLKKGKPYSIVVVAEGILTDGRKRAAEYIAQEIEYETGIETRETVLGYIQRGGSPTPFDRNLSTRMGGHATELIANGQFGRMIALKGDDISSIPLEEVAGKLKLVTEDHDLVIQGRRMGICFG

SEQ ID NO: 11319 - protein, 192 aa, Zea mays
MSAVNITNVAVLDNPTAFLNPFQFEISYECLVPLDDDLEWKLIYVGSAEDENYDQQLESVLVGPVNVGTYRFVLQADPPDPSKIREEDIIGVTVLLLTCSYMGQEFMRVGYYVNNDYDDEQLREEPPAKVLIDRVQRNILADKPRVTKFPINFHPEPSTGPGQQQQQEPQTTSPENHTGNGEANGSKPEADQ

SEQ ID NO: 11320 - protein, 234 aa, Zea mays
  unsure (1)..(234): unsure at all Xaa locations
LSQVILTAASFNPHLWYRIGQASTDAKRIIDEERANARLEIGSAKASVQKIQSALKEQEKFSHRTGKQDVDELKEEVQEARXMDIENEIQVLCDQLAKKSSDSLRLLKELELHRSYGENDMPLYELKGLETLGSTLHIVVHDCASVDFWNSSIQWFRIQPEGSKKEIIXSTTKPAYAPEPHDVGRYTQAEVKSGGQTSITKTAGSVDPFFSFVAAGLVHYVEALVRRRETGYNV

SEQ ID NO: 11321 - protein, 136 aa, Brassica napus
STLSLSTVGKIDPAAGLGSYVEALVRKHDVDFNVVVTQMSGEDHTSESIHLFHVGKMRIKLCKGKTVIAKEYYSSAMQLCGVRGGGNAAAQAVYWQAKKGVSFVVAFESERERNAAIMLARRFACDCNVTLAGPED

SEQ ID NO: 11322 - protein, 230 aa, Arabidopsis thaliana
MAVSNSLTISPRKLRSDLYSYSYQNNSKTPLVISVLSSLIDRTLTRNERISRRALPSSGAGGKTQIFDCREIPDMTIQSYLGRIFRYTKAGPSVYVVAYVYIDRFCQTNPGFRISLTNVHRLLITTIMIASKYVEDLNYRNSYFAKVGGLETEDLNKLELEFLFLMGFKLHVNVSVFESYCCHLEREVSFGGGYQIEKALRCAEEIKSRQMIIQDPKHHHHHHQLARILL

SEQ ID NO: 11323 - protein, 358 aa, Aspergillus niger
MSTQNTNAQNLSFVLEGIHRVKFEDRPIPEINNPHDVLVNVRFTGICGSDVHYWEHGSIGQFIVKDPMVLGHESSGVVSKVGSAVTSLKVGDCVAMEPGIPCRRCEPCKAGKYNLCVKMAFAATPPYDGTLAKYYVLPEDFCYKLPESITLQEGAIMEPLSVAVHIVKQAGINPGQSVVVFGAGPVGLLCCAVAKAYGASKVIAVDIQKGRLDFAKKYAATATFEPAKAAALENAQRIITENDLGSGADVAIDASGAEPSVHTGIHVLRAGGTYVQGGMGRSEITFPIMAACTKELNVKGSFRYGSGDYKLAVSLVSAGKVNVKELITGVVKFEDAERAFEEVRAGKGIKTLIAGVDS

SEQ ID NO: 11324 - protein, 391 aa, Triticum aestivum
MKTFLVFALLALAAARAVAQISQQQQQPPFSQQQQPPFSQQQQPPFSQQQQSPFSQQQEQQQQPPFLQQQQPPFSQQPPISQQQQPPFSQEQQPPFSQQQQPPFSQQQQPPYSQQQQPPFSQQQQPPFSQQQQPPFSQQQQQTNKQQQQQPFTQQQPPFSQQPPISQQQQQQQQQQQPFTQQQPPFSQQPPISQQQQPPFSQQQQTPFSQQQQIPVIHPSVLQQLNPCKVFLQQQCIPVAMQRCLARSQMLQQSICHVMQQQCCQQLRQIPEQSRHESIRAIVYSIILQQQQQQQQQQQGQSIIQYQQQQPQQLGQCVSQPQQQLQQQLGQQPQQQQLAHGTFLQPHQIAQLEVMTSIALHNLPMMCSVSVPLYETTTSVPLGIGIGVGVY

SEQ ID NO: 11325 - protein, 129 aa, Picrophilus torridus DSM 9790
MSWTEAEVRELKVGRYILIDDSPCRIVDITMSKPGKHGEAKGRIVAIGVFDNQKHSVVYPVKHKVKVPVITKKNAQVLSIANNEVQLMDSETFETFVIPVDPADLEKIKPGMEVPYWEAMGQRKIMLQN

SEQ ID NO: 11326 - protein, 196 aa, Glycine max
  unsure (1)..(196): unsure at all Xaa locations
MSESEKQRVTGKVKWFDDQKGFGFITTDDSGEEFFVHQSSIRSDGFRSLALGESVEFLIDSDPEGRTKAVDVTGPDESPVQGTRGGGGGGRGSYGGGGGRGGYGGGGRGGRGGYGGGGGGYGGGGYGGGGGYGGGGGGGGGGGCYKCGETGHIARDCSXQGGGGGGRYGGGGGGGGSCYNCGESGHFARDCPSSAR

SEQ ID NO: 11327 - protein, 81 aa, Glycine max
SVQFIAFDIRFSVLFQSALFNFHSFLTVILLGICACTYFKMQFPAILDQKTGYICLHLAPFVNTDCNSYIVSADVNNVSFK

SEQ ID NO: 11328 - protein, 405 aa, Candida albicans SC5314
MTSMEPADTSIRSLNDINLQELANKQHQRNIYAQGSPTLEDSITSNGNDINNPNNNINKTNNNSNSSLSLTKKTSRHINKDTTTKGKYTLNDFQILRTLGTGSFGRVHLTRSIHNGRFYAMKVLKKQRVVQMKQIEHTNDERRMLKLAQHPFIIRMWGTFQDCHNLFMIMDYIEGGELFSLLRKSQRFPTPVAKFYAAEVFLAIEYLHSLDIIYRDLKPENILLDKNGHIKLTDFGFAKEVQDVTYTLCGTPDYIAPEVVATKPYNKSVDWWSFGILIFEMLTGYTPFYDPTPMKTYENILNGSITYPDYLPPDILDLLQKLIVKDLTQRLGNLQGGSDDVKNHPWFKEVIWERLLSRDIETPYEPPITSGVGDTSQFDRYPEDKDLDYGISGVEDPYRDQFQDF

SEQ ID NO: 11329 - protein, 363 aa, Buchnera aphidicola
MHKQYHIAVLPGDGIGPEVMQEAYKILQVLREHFSLFIKTKEFDIGGIAIDNHGIALPKKTLIGCENSDAILLGSIGGKKWDTLPINERPERASLLPLRKHFNFFCNLRPSNLYKELNFLSPLRNDIVKHGFDILCVRELTGGIYFGKPRGRVTKKKLMYAFDTEIYYKFEIVRIAHLAFKLARSRKHKLCSIDKANVLESSILWREVVEEVSKEYPDVILSHLYIDNVCMQIIKDPNQFDVLLCSNLFGDIISDECAMITGSIGMLPSASLNEKNFGLYEPAGGSAPDIQGKNIANPIAQILSLSMLIRYSMNLNKIANKIDNAVINVLKKGYKTMDISKDQNYLKTNEMGDVIADFLKRDK

SEQ ID NO: 11330 - protein, 286 aa, Pediococcus pentosaceus ATCC 25745
MEYVKLNDGNQMPQLGFGVFQVSDLSQAEQAVSDALDTGYRLIDTAAAYDNEEAVGAAIKKSGINRSEIFVTSKLWVDHFTYEKAQQGIEDSLNKLGLDYIDLYLLHQPYGDTAGAWRALIEAQKAGKIKSIGVSNFAPDQLMNLELMSDVKPALNQIEVSPWYQEGEAVGFAQSQDVQVEAWAPFAEGKHNIFSNETIAEIGQKYGKANGQVILRWLLQRGIVVIPKSVHKTRMAENLDVFDFELSDDDMQKMSSLDKNESQFFDHRDPEAIVSIFGESLKALRK

SEQ ID NO: 11331 - protein, 463 aa, Methanocaldococcus jannaschii DSM 2661
MFIDGKWINREDMDVINPYSLEVIKKIPALSREEAKEAIDTAEKYKEVMKNLPITKRYNILMNIAKQIKEKKEELAKILAIDAGKPIKQARVEVERSIGTFKLAAFYVKEHRDEVIPSDDRLIFTRREPVGIVGAITPFNFPLNLSAHKIAPAIATGNVIVHHPSSKAPLVCIELAKIIENALKKYNVPLGVYNLLTGAGEVVGDEIVVNEKVNMISFTGSSKVGELITKKAGFKKIALELGGVNPNIVLKDADLNKAVNALIKGSFIYAGQVCISVGMILVDESIADKFIEMFVNKAKVLNVGNPLDEKTDVGPLISVEHAEWVEKVVEKAIDEGGKLLLGGKRDKALFYPTILEVDRDNILCKTETFAPVIPIIRTNEEEMIDIANSTEYGLHSAIFTNDINKSLKFAENLEFGGVVINDSSLFRQDNMPFGGVKKSGLGREGVKYAMEEMSNIKTIIISK

SEQ ID NO: 11332 - protein, 472 aa, Chloroflexus aurantiacus
MSVGVAYTLTLRCQIENRPGMLGRLTTLIGEVGGDIGAIDIVRAERNILVRDITVRVQDEQHGEQLVAAINTLQNIKVLQVSDRVFLTHLGGKLATQSRVPLKTRDDLSLAYTPGVARVCRAIADDPEKVYALTWKGNSVAVVSDGSAILGLGNLGPEAAMPVMEGKAILFKELANIDAVPICLRSQDPDVIVQTVEQIAPSFGGINLEDIAAPNCFIVEGRLEESLDMPVMHDDQHGTAVVVLAALRNAVRIVGKRLADVRVVVNGIGAAGTAIIRTLIEAGVGEITAVDRFGILVEGDHARQTPMQRIIASQTNRERRRGDLAVALRGADVFIGVSKGNILTPDHIRVMSSDPIVFALANPIPEGDPDMLRQYARVVATGRSDQPNQINNVLSFPGIFRGALDVHARRITSAMRLAAAEALATVIPPEEMNEDYIVPSVFNRQVVPAIAAAVAQAAIAEGVARRTHMPGD

SEQ ID NO: 11333 - protein, 115 aa, Glycine max
MSAINITNVTALDNPAPFVSPFQFEISYECLTSLKDDLEWKLIYVGSAEDETYDQTLESVLVGPVNVGNYRFVLQADPPDPSKIREEDIIGVTVLLLTCSYMGQEFLRVGYYVNN

SEQ ID NO: 11334 - protein, 394 aa, Thermobifida fusca
MLSTQSADIVRATLPVVGAHLDEITSRFYSTMFSERPELLDGLFNRGNQANGEQRRALAGSIAGFASALLANPDERPDALLARIAHKHAAVAVTDDQYVIVHKYLFGAIADVLGDAATPEVIAAWDEVYWLMGGALIALEARLYAEKNADNGRTWREWTIVDRREETPDVFSLVLRPSDGGPLPEARPGQYVSVLHRMPDGIRQIRQYSISGGDEHTRRITIKRVRGTEHTPEGEMSALLYATAKAGDTLTVSAPFGDVVLTDSDRPLVFATAGIGCTPIVGMLNYLAATGATRRILALHADRSRAEHALWQETSTLIARLPHAQYVVWYEEGDGGLPGQMDLTGLEIPADAEVYLCGPLPFMREIRTQFLAAGVPAKDIHYEVFGPDLWLPAD

SEQ ID NO: 11335 - protein, 291 aa, Saccharomyces cerevisiae
LVHVASVEKGRSYEDFQKVYNAIALKLREDDEYDNAIGYGPVLVRLAWHISGTWDKHDNTGGSYGGTYRFKKEFNDPSNAGLQNGFKFLEPIHKEFPWISSGDLFSLGGVTAVQEMQGPKIPWRCGRVDTPEDTTPDNGRLPDADKDAGYVRTFFQRLNMNDREVVALMGAHALGKTHLKNSGYEGPWGAANNVFTNEFYLNLLNEDWKLEKNDANNEQWDSKSGYMMLPTDYSLIQDPKYLSIVKEYANDQDKFFKDFSKAFEKLLEDGITFPKDAPSPFIFKTLEEQGL

SEQ ID NO: 11336 - protein, 291 aa, Saccharomyces cerevisiae
LVHVASVEKGRSYEDFQKVYNAIALKLREDDEYDNYIGYGPVLVRLAWHISGTWDKHDNTGGSYGGTYRFKKEFNDPSNAGLQNGFKFLEPIHKEFPWISSGDLFSLGGVTAVQEMQGPKIPWRCGRVDTPEDTTPDNGRLPDADKDAGYVRTFFQRLNMNDREVVALMGAHALGKTHLKNSGYEGPQGAANNVFTNEFYLNLLNEDWKLEKNDANNEQWDSKSGYMMLPTDYSLIQDPKYLSIVKEYANDQDKFFKDFSKAFEKLLEDGITFPKDAPSPFIFKTLEEQGL

SEQ ID NO: 11337 - protein, 291 aa, Saccharomyces cerevisiae
LVHVASVEKGRSYEDFQKVYNAIALKLREDDEYDNYIGYGPVLVRLAWHISGTWDKHDNTGGSYGGTYRFKKEFNDPSNAGLQNGFKFLEPIHKEFPWISSGDLFSLGGVTAVQEMQGPKIPWRCGRVDTPEDTTPDNGRLPDADKDAGYVRTFFQRLNMNDREVVALMGAHALGKTHLKNSGYEGPWGAANNVFTNEFYLNLLNEDWKLEKNDANNEQWDSKSGYMMLPTDYSLIQDPKYLSIVKEYANDQDKFFKDFSKAFEKLLEDGITFPKDAPSPFIFKTLEEQGL

SEQ ID NO: 11338 - protein, 291 aa, Saccharomyces cerevisiae
LVHVASVEKGRSYEDFQKVYNAIALKLREDDEYDNYIGYGPVLVRLAWHISGTWDKHDNTGGSYGGTYRFKKEFNDPSNAGLQNGFKFLEPIHKEFPWISSGDLFSLGGVTAVQEMQGPKIPWRCGRVDTPEDTTPDNGRLPDADKDAGYVRTFFQRLNMNDREVVALMGAHALGKTHLKNSGYEGPYGAANNVFTNEFYLNLLNEDWKLEKNDANNEQWDSKSGYMMLPTDYSLIQDPKYLSIVKEYANDQDKFFKDFSKAFEKLLEDGITFPKDAPSPFIFKTLEEQGL

SEQ ID NO: 11339 - protein, 141 aa, Triticum aestivum
  unsure (1)..(141): unsure at all Xaa locations
MAPTVMASSATSVAPFQGLKSTAGLPVSRRSNGASLGSVSNGGRIRCMQVWPIEGIKKFETLSYLPPLKHXGLLKXVDYLXSAPKWVPCLEFKQGGXTSREHNASPGVYDGRYWAMWKLPMFRCTDPTRXXQVEEARGYLT

SEQ ID NO: 11340 - protein, 502 aa, Streptomyces atroolivaceus
MSDFSRRRLLKTSAVAGAGAVVVPGVAAAATPSAGVVTEASVNEAYEAQCSPAKLTGRIVRPHDPGYTDARLGWDQLFSHYPLVIVFAQNTQDVVNALTWARQNDVALRIRSGRHSLEGWSNVDSGLVIDISELKSVHLDSAARVATVGAGLNQLEAVTTLAKRNFAVTTGTEGTVGLAGATLGGGFGFLTRWLGMACDSLIGAEVVVAEGGECAKVIKADLTHNSDLLWALRGAGNGNFGIVTSLTYKVAPLKSVTYVQATWDGIGDLRRVFNAWQRTALHADDRLGTQVEIHRNQTLLFAVLAEGTPAEAKKLLAPILSVGSPQVSVQVGNWGEVYSGFQIPTANEPANWKFYSQFTRKPFPGKAIDVICSFMKHAPTDDSNFFTQAFGGAVRRSPRGGTAFPHRDALFYSEPGAGWGTRSDQPGICDPLTPQAQAWIAEFSQALRPYVDGAYVNVPNVGMQDWETAYWRGNFDRLREIKAKYDPHNVFQYDQSIPPASR

SEQ ID NO: 11341 - protein, 278 aa, Staphylococcus epidermidis ATCC 12228
METVQFYNGRTMPKIGLGTYRVKDGDECRESVKYAIERGYRSIDTAMIYGNEETVGQGIKEGLESTGLSREDLFITSKLWLTDFGRQNVEDAYRQSVAKLGLDYLDLYLMHWPGTNEAVMIDTWRGMEDLYKQNQVKNIGVSNFTPEHFEALLAQVSIKPVINQVEFHPYLTQNKLRKYLEAQNIIMESWSPLMNSQILHDEVINEVANEVGKTPAQVVIRWNIQHDVVVIPKSVTPHRIEENLDVWNFELSDNQMERIDQLNQDKRIGPNPLEFDGK

SEQ ID NO: 11342 - protein, 663 aa, Triticum aestivum
  unsure (1)..(663): unsure at all Xaa locations
MPAWWKGKGRSKSKAPAPAGDAGTIPAVRDGEKDRKNKKATSFDEALIGRXGRGKQLQQPAPAVGHPLPRPAFMPSASAPASASASASSGGSSSLGSSAASDEPLDLGIYRISDANRTPAIDSRKQSLVLEEGRFVVHNLASENNRSCEPSVSPRKEFQSNILDLPSDRTTYCHGRKSTEIVFATRMPSSPPSSRGKNCPTSPVHSRAFGQCPGSPTAWQEDARSSSSPHPLPLPPGSPCTSSRSLHSQWKKGKLLGSGTFGQVYLGFNSEGGQMCAIKEVKVIADDSNSKECLRQLNQEMLLLNQLSHPNIVQYYGSELSSETLSVYLEFVSGGSIHKLLQEYGPFGETILRNYTAQILSGLAYLHGRNTVHRDIKGANILVDPNGDIKLADFGMAKHISAYTSIKSFKGSPYWMAPEVIMNTNGYSLSVDIWSLGCTILEMATARPPWSQYEGVAAIFKIGNSKDIPDIPDHLSSEAKSFLKLCLQRDPAARPTAAQLIEHPWVKDQASVRSSRSGSGITRDMFSTSTDGSKATVKTSIELSSYRSLSPLRDTNLRMRNLVVPASSIPSISTHRASAISASNVRMNMSLPVSPCTSPLRQYRQSNRSCLPSPPHPAYSAGAANYSPINNVLYPTRPSNYLTDPWLETPRQKTQTFDSPRRL

SEQ ID NO: 11343 - protein, 249 aa, Cucumis sativus
MGKCYPVVSEEYQKAIEKAKRKLRGFIAEKNCAPLMLRLAWHSAGTFCKDSKTGGPFGTMRFKSELAHGANNGLDIAVRLLEPIKEQFPILSYADFYQLAGVVAVEVTGGPDVPFHPGREDKPEPPPEGRLPDATKGSDHLRDVFYTMGLSDQDIVALSGGHTLGRAHKERSGFEGPWTTNPLIFDKSYFTELLTGEKEGLLQLASDKALLSDPVFRPLVEKYAADEDAFFADYAEAHQKLSELGFADA

SEQ ID NO: 11344 - protein, 143 aa, Fusobacterium nucleatum subsp. vincentii ATCC 49256
MSMTQINWYPGHMKKTKDLIEENLKLIDVVLEIVDARIPLSSKNPNIASLSKNKKRIIVLNKSDLVSKQELDKWKKYFKEQDFADEVVEMSAETGYNVKKLYEAIEFVSKERKEKLLKKGLKKVSTRIIVLGIPNVGKCKINK

SEQ ID NO: 11345 - protein, 638 aa, Zea mays
  unsure (1)..(638): unsure at all Xaa locations
MGNTCVGPSITMNGFFQSVSTALWKTPQEGDALPAAANGPGGASPGRSQSALPKPASDVHHVAVQSEAPEPVKIAAYHSEPAPAVRSEAPEPVKIAASHSEPAPMAAKPGXGAAANASPSPSPRPRPQVKRVSSAGLLXLGSVLRRKTENLKDKYSLGRRLGQGQFGTTHLCVERATGKELACKSILKRKLATDDDVEDVRREIQIMHHLAGHPSVVAIRGAYEDAVAVHLVMELCGGGELFDRIVRRGHYTERKAAELARVIVGVVEACHSMGVMHRDLKPENFLFADHSEEAALKTIDFGLSIFFRPGQIFTDVVGSPYYVAPEVLKKRYGPEADVWSAGVIIYILLCGVPPFWAENEQGIFEEVLHGRLDFESEPWPSVSEGAKDLVRRMLIRDPRKRLTAHEVLRHPWVQVGGLAPDRPLDSAVLSRMKQFSAMNKLKKMALRVIAENLSEDEIAGLREMFKMIDADNSGQITFEELKVGLEKVGANLQESEIYALMQAADVDNNGTIDYGEFIAATLHLNKVEREDHLFAAFQYFDKDGSGYITADELQVACEEFGLGDVQLEDVIGEVDQDNDGRIDYNEFVAMMQKPPVGXSRRRPTCRTASASGSGGXRSGWPRPLCLXLPCCLGVGVDD

SEQ ID NO: 11346 - protein, 251 aa, Brassica napus
MNIAHTIFGVFGNATALFLFLAPSITFKRIIKNKSTEQFSGIPYPMTLLNCLLSAWYGLPFVSKDNTLVSTINGTGAVIETVYVLIFLFYAPKKEKAKIFGVFTAVRAVFATVALVSLFALHGNGRKLFCGIAATVFSIIMYASPLSIMRLVVKTKSVEYMPFFLSLFVFLCGTSWFIYGLIGRDPFVAIPNGFGCALGTVQLILYFIYCGNKGDKSTDDAEKDEKKTVEMKDEEKKKQNVVNGKQQEQQV

SEQ ID NO: 11347 - protein, 196 aa, Oryza sativa (japonica cultivar-group)
MASSPYHAAVGVAVLAILLAAPAAEAGAPTAAPLANYSLEDACKKTGPHYGLCIVTLSADRSAKSSDTVGLARVAVLAAQKNASETATYLSSIYDDDSIEKKTVQLQQCLEDCSERYEAAVEQLTDATVALDTGGYEEAMALVAAGQAEVKMCQRGFKAVPQHRNILTLRNREVDQLCSIAFTITKLIRVSPSAEE

SEQ ID NO: 11348 - protein, 299 aa, Triticum aestivum
  unsure (1)..(299): unsure at all Xaa locations
MENADVPNGATAPAPTQATPVVREQDRLMPIANVIRIMRRALPAHAKISDDAKEAIQECVSEFISFVTGEANERCHMEHRKTVNAEDIVWALNRLGFDDYVVPLSVFLHRMRDPEXGATGGAAAGGRPAVTSAPPRAAPPVLHAMPLHAQMQRPMYAPPALVQVQNQMQRPIYAPPAPMQVQNQVQWPMYAPPPPVQVQMQRGVYAPRAPVQGYTVGITPVRPNVGGQCHVFGGEQVVAQQYYGYGYGEGAYGAGSSKGGACADEGSSSNGVPVPGEGTGEPEPEPAAEGSQDKPVQSG

SEQ ID NO: 11349 - protein, 177 aa, Oryza sativa (japonica cultivar-group); identical to SEQ ID NO: 276

SEQ ID NO: 11350 - protein, 278 aa, Triticum aestivum
RLKRKTESVKEKYSLGRRLGQGQFGTTYLCVERSSGKEYACKSILKRKLVTDDDVEDVRREIQIMYHLAGHPNVISIRGAYEDAVAVHLVMELCAGGELFDRIVQKGHYTERKAAELARVIVGVVEVCHSMGVMHRDLKPENFLFVDQTEEAALKTIDFGLSVFFRPGQIFTDVVGSPYYVAPEVLKKKYGPEADVWSAGVIIYILLCGVPPFWAENEQGIFEEVLHGKLDFESDPWPSISEGAKDLVRRMLLRDPKKRLTAHEVLRHPWVQVGGLAP

SEQ ID NO: 11351 - protein, 530 aa, Triticum aestivum
  unsure (1)..(530): unsure at all Xaa locations
MGEQKGNILMGKYEMGKMLGQGTFAKVYHARNIETSQSVAIKVTDKEKVLKGGLTDQIKREISVMKLVKHPNIVQMYEVMATKTKIYFVLEHVKGGELFNKVQRGRLKEDAARKYFQQLICAVDFCHSRGVYHRDLKPENLLLDENSNLKVSDFGLSTISECRRLDGLLHTSCGTPAYVAPEVINRKGYDGAKADIWSCGVILFVLLAGYLPFQDKNLMNMYKKIGKAEYKCPSCISSHMQRPRAGXDFLKAKDAVPAADMTATSDPLSCSNSATEGKEQGAKKLSNLNAFDIISLSTGLDLSXGMFEDNDKKXGESKFTSTNSASTIVSKIEDIAKCMRLKLVKKDGGMMRMXESFKPREGKGVMSIDAELFEVIHRFDVMVLNETVWDSSDVLTCSLDMKKELTPVFSVVELKETEADTMEYQIVLKQEMRPALKDISIGGARRAAAAISNSSYHEKNCAKCYILFTTRGTYQASVCFCNFYYSKFVIRLHCPCDVCVNFSSHLSMKIYLKAWCLQNRCQVFVQKRTC

SEQ ID NO: 11352 - protein, 476 aa, Bacillus thuringiensis serovar konkukian str. 97-27
MQNKIIVMFQKDFRLYDNPALFEAAQSGEVVPVYVHDETFSMGSASKWWLHHAIIDVKKQLEALGSTLIIRKGSTQEEILSLVEQLGITAVYWNICYDPDRLQFNQKMKMMLEHKGMICKEFNSHLLLEPWVIKKKDNTEYKVFTPFYNAFQKQVIHKPISKVQSIKGGNSLPVSLSVSELHLLPTIPWTSHMESIWEPTEEGAYKTWKEFFSSKLASYSEGRDFPNQNAHSMLAPYLSFGQISVKLIYHYLINKSTESQCSLFEKQVNSFIRQLIWREFSYYLLYHYPFTAYKPLNKSFEHFPWNNEEELLRVWQKGDTGYPFIDAGMRELWQTGFMHNRTRMAVASFLVKHLLIPWQEGAKWFMDTLLDADIANNTMGWQWVAGSGADASPYFRIFNPITQGEKFDKNGEYIREWVPELKDMPNKYIHKPWEAPEHILQKANIQLGHTYPLPVVDHKAARERALCAYKSMKEFV

SEQ ID NO: 11353 - protein, 341 aa, Actinomadura hibisca
MTEPEGPHAASLRLQSLLDGMRVAKVVQVLAELQVADAVADGPCKPAEIAADVGADPDALYRVLRCAASFGVFTEDEDGRFGLTPMAALLRTGTDDSHRDLFMMAAGDLWWRPYGELLETVRTGRPAAELAFGMPFYDYLGTDPAAAGLFDRAMTQVSKGQAKAILGRCSFERYARIADVGGGHGYFLAQVLRSSPRTEGVLLDLPHVVAGAPAVLEKHEVADRVQVVPGSFFDALPTGCDAYLLKAILINWPDADAERILHRVREAIGTDRDARLLVVEPVVPPGDVRDYSKATDIDMLAIIGGRQRTVAEWRRLLRAGGFELVGEPTPGRREVMECRPI

SEQ ID NO: 11354 - protein, 438 aa, Bacillus halodurans C-125
MKRFDLIIRSSTVVTETTTYRADVAIRNGIVSAITEPGSISSDDGPAIDGTGLHLFPGMVDVHVHFNEPGRTEWEGFASGSKSLAAGGVTTYFDMPLNSNPPTITREELDKKRQLANEKSLVDYRFWGGLVPGNIDHLQDLHDGGVIGFKAFMSECGTDDFQFSHDETLLKGMKKIAALGSILAVHAESNEMVNALTTIAIEEQRLTVKDYSEARPIVSELEAVERILRFAQLTCCPIHICHVSSRKVLKRIKQAKGEGVNVSVETCPHYLLFSLDEFAEIGYLAKCAPPLRERQEVEDLWDGLMAGEIDLISSDHSPSLPQMKTGKTIFEVWGGIAGCQNTLAVMLTEGYHKRKMPLTQIVQLLSTEPAKRFGLYPQKGTIQVGAEASFTLIDLNESYTLNASDLYYRHPISPYVGQRFRGKVKHTICQGKHVYQDH

SEQ ID NO: 11355 - protein, 419 aa, Zea mays
PTRPVLLRFADLIERHAEEVAALETWDNGKTLAQAAGAEVPMVARCVRYYAGWADKIHGLVAPADGAHHVQVLHEPVGVAGQIIPWNFPLLMFAWKVGPALACGNTVVLKTAEQTPLSALYVANLLHEAGLPEGVLNVVSGFGPTAGAALCSHMGVDKLAFTGSTGTGQIVLELAARSNLKPVTLELGGKSPFIVMDDADVDQAVELAHQAVFFNQGQCCCAGSRTFVHERVYDEFVEKSKARALKRVVGDPFRDGVEQGPQIDGEQFNKILRYVQSGVDSGATLVAGGDRVGDRGFYIQPTVFADAKDEMKIAREEIFGPVQTILKFSGVEEVIRRANATPYGLAAGVFTRSLDAANTLSRALRAGTVWVNCYDVFDATIPFGGYKMSGVGREKGIYALRNYLQTKAVVTPIKNPAWL

SEQ ID NO: 11356 - protein, 322 aa, Glycine max
  unsure (1)..(322): unsure at all Xaa locations
MASSLRISRLISRSFSSTSFFSRGGNGFLGSRQSKFSTSAAIEEEPIKPSIQVEHTQLLIDGKFVDAASGKTFQTLDPRTGEVIAHVAEGHSEDVDRAVSAARKAFDHGPWPKMTAYERQRILLRVADLIEKHNDELAALETWDNGKPYEQAAKIEVPMLVRLIRYYAGWADKIHGLTVPADGPYHVQTLHEPIGVAGQIIPWNFPLLMFAWKVGPALACGNTIVLKTAEQTPLSALYAAKLFHEAGLPAGVLNVVSGFGPTAGAALASHMEVDKLAFTGSTDTGKVVLELAAKAILXPVTLELGGESPXIVCEDADVDQAV

SEQ ID NO: 11357 - protein, 344 aa, Datura stramonium
MEVLSSTHTNGSSLLKNGVITMNGHHNGNSDHRNGGTTVHENGRKLLGNSNSIKPGWFSEFSALWPGEAFSLKIEKLLFQGKSDYQDVMLFESATYGKVLTLDGAIQHTENGGFPYTEMIVHLPLGSIPNPKKVLIIGGGIGFTLFEVLRYPTVEKIDIVEIDDVVVDVSRKFFPYLAANFNDPRVTLVLGDGAAFVKAAQAGYYDAIIVDSSDPIGPAKDLFERPFFEAVAKALRPGGVVCTQAESIWLHMHIIKQIIANCRQVFKGSVNYAWTTVPTYPTGVIGYMLCSTEGPEVDFKNPVNPIDKDETHANSKLGPLKFYNTDIHKAAFILPSFARSMIES

SEQ ID NO: 11358 - protein, 122 aa, Buchnera aphidicola str. APS (Acyrthosiphon pisum)
MSITKEQILEAISEMSVMNVVDLITAMEEKFGVSASMSINSNNHNEKDLREEKTEFDIFLKVIGPNKVSVIKTVRSATGLGLKEAKDLVESAPTVLKENISKEDAESLKKTLEDVGAEIEIK

SEQ ID NO: 11359 - protein, 314 aa, Vibrio cholerae O1 biovar eltor str. N16961
MVNNSIQWFPGHMHKARKEIEEAIPQVDVIIEVLDARIPFSSENPLISHIRGEKPCVKVLNKRDLADPELTELWIAHLEQEKGVKAMAITTSNPQEVHKILELCRKLAPQREEIGKNIRTMIMGIPNVGKSTIINTLAGRAIAQTGNQPAVTRRQQRINLQNGIVLSDTPGILWPKVENPHSGFRLAATGAVKDTAMEYDEVAFYTVEYLAKHYPERLKERYQIDELPETDVELMEEIGRKRGALRAGARVDLHKASEILLHELRQGVLGQITLERPEMITEELQQVEIDEALKAEEKAKRKEERRKRYLRNKR

SEQ ID NO: 11360 - protein, 178 aa, Triticum aestivum
MGSNGGADGAGFNTDALEGVRAILLKPSESLDESTRIAGPDFNDAGLGLAGMLGSLASTGFQASHLGDAIDVVNQMLDWRLSHEKPSEDCDGAELEPKYRESVKCKIFLGFTSNLVSSGIRDVIRFLVQHHMVDVIVTSAGGIEEDLIKCLGPTYRGDFSLPGALLRSKGLNRIGNLL

SEQ ID NO: 11361 - protein, 496 aa, Staphylococcus aureus subsp. aureus COL
MELLKHLSQRQYIDGEWVESANKNTRDIINPYNQEVIFTVSEGTKEDAERAILAARRAFESGEWSQETAETRGKKVRAIADKIKEHREALARLETLDTGKTLEESYADMDDIHNVFMYFAGLADKDGGEMIDSPIPDTESKIVKEPVGVVTQITPWNYPLLQASWKIAPALATGCSLVMKPSEITPLTTIRVFELMEEVGFPKGTINLILGAGSEVGDVMSGHKEVDLVSFTGGIETGKHIMKNAANNVTNIALELGGKNPNIIFDDADFELAVDQALNGGYFHAGQVCSAGSRILVQNSIKDKFEQALIDRVKKIKLGNGFDADTEMGPVISTEHRNKIESYMDVAKAEGATIAVGGKRPDRDDLKDGLFFEPTVITNCDTSMRIVQEEVFGPVVTVEGFETEQEAIQLANDSIYGLAGAVFSKDIGKAQRVANKLKLGTVWINDFHPYFAQAPWGGYKQSGIGRELGKEGLEEYLVSKHILTNTNPQLVNWFSK

SEQ ID NO: 11362 - protein, 193 aa, Zea mays
MSAVNITNVAVLDNPTAFLNPFQFEISYECLVPLDDDLEWKLIYVGSAEDENYDQQLESVLVGPVNVGTYRFVLQADPPDPSKIREEDIIGVTVLLLTCSYMGQEFMRVGYYVNNDYDDEQLREEPPAKVLIDRVQRNILADKPRVTKFPINFHPEPSTGPGQQQQQQEPQTTSPENHTGNGEANGSKPEADQ

SEQ ID NO: 11363 - protein, 284 aa, Leuconostoc mesenteroides subsp. mesenteroides ATCC 8293
MAQIIQWFPGHMAKAFRLMRENLKLVDVVFELVDSRIPESSRNPEVDKLIGNKPRLLIMTKADLADPDQTRAWKKHFEAQGYTVLVLDTRDPRTPQLVTKAARRAVEAKKAAQLAKGIQDQPIRAMISGVPNVGKSTLLNHLVMKNVAPTADRPGVTKKIAWLKTPTKLELLDSPGVLWPKFEDQNIGMKLALTGAVKDTIFAKDDAALFLINFFREYRPEAIIERYHLNDNIFDQENVDVLLSITSKLGFKDDYDKASERILNDLRKNKLGAFTLDLIETKND

SEQ ID NO: 11364 - protein, 355 aa, Glycine max
  unsure (1)..(355): unsure at all Xaa locations
MFEGLCLKMEKRGNVLMEKYEFGKLLGQGNFAKVYHARDVRTGESVAVKVIDKEKILKIGLVDQTKREISIMRLVKHPNVLQLYEVLATKTKIYFIIEYAKGGELFNKIAKGRLTEDKARKYFQQLVSAVDFCHSRGVYHRDLKPENLLLDENGVLKVADFGLSALVESHRQKDMLHTICGTPAYVAPEVISRRGYDGTKADVWSCGVILFVLLAGHLPFYDLNLMSLYNKIGKADYKCPNWFPFEVRRLLAKILDPNPNTRISMAKVMENSWFXKGFKPKSGQVKREAVNVALVDSDQVFCLXENTSAAVVXGRASIVKPSQFNAFNIXSLSAGLDLSGXFAANVELDDIYIYE

SEQ ID NO: 11365 - protein, 236 aa, Zea mays
  unsure (1)..(236): unsure at all Xaa locations
MGRSNRKSPGSSGWIPGTDEAAAGGDDVLALEDAAAPREWTAQVEPGVQITFGTIPTGGNDLKRIRFSREMFNKWEAQRWWGENYDRIVELYNVVMFSGRQQGCSTPVSSVDDSQRDSSYSRGGSTSRGSPITXRRRRRHCRRWQAKNRSPGAPYDPSRATTSSRDEASVSLSNVSDLEATEWIEEDEPGVCLTIRELGDGTRELRRIRFSREIFGEDRAKVWWEQNRERIQAEYL

SEQ ID NO: 11366 - protein, 531 aa, Zea mays
MEAVGVTPAPVAAPEKKKLLDLKDPFPAAANGGAKASPASKWAMKKKLVGGDAGYVLEDVPHLTDYMPQLPTYPNPLQDNPAYSVVKQYFVNPDDTVTQKIVVHKTSARGTHFRRAGPRQRVYFQSDEVNAAIVTCGGLCPGLNTVIRELVCGLYDMYGVSSVVGIEGGYKGFYSKNTVALTPKSVNDIHKRGGTVLGTSRGGHDTAKIVDCLQDRGINQVYIIGGDGTQKGASVIYEEVRRRGLKCSVVGVPKTIDNDIAVIDKSFGFDTAVEEAQRAINAAHVEAESAENGIGVVKLMGRNSGFIAMYATLASRDVDCCLIPESPFYLEGKGGLLEFVERRLKDNGHMVIVVAEGAGQDLIARSMNFVDTQDASGNKLLLDVGLWLSQKIKDHFKKKPSFPITLKYIDPTYMIRAVRSNASDNVYCTLLAHSALHGAMAGYTGFTVAPVNGRHAYIPFYRITEKQNKVVITDRMWARVLCSTNQPCFLSHEDVENMKHDDDEHHHMHNTQLLEGGSSPVSKCNGSAAAV

SEQ ID NO: 11367 - protein, 366 aa, ASPERGILLUS NIDULANS FGSC A4
MTSQRPTSSSSSLLDIVANLASPKSLLFNAHHTNPPPSLPSQRAPTMDKSQQPSSFQQLEKLGEGTYATVFKGRNRQTGELVALKEIHLDSEEGTPSTAIREISLMKELKHESIVSLYDVIHTENKLMLVFEYMDKDLKKYMDTRGDRGQLDQATIKSFMHQLMSGIAFCHDNRVLHRDLKPQNLLINKKGQLKLGDFGLARAFGIPVNTFSNEVVTLWYRAPDVLLGSRTYNTSIDIWSAGCIMAELYTGRPLFPGTTNEDQLQKIFRLMGTPSERSWPGISQLPEYRANFHVYATQDLGLILPQIDPLGLDLLNRMLQLRPEMRIDAHGALQHPWFHDLPQLQAQLQQQQMAGYGGMMPPQQAY

SEQ ID NO: 11368 - protein, 257 aa, Zea mays
  unsure (1)..(257): unsure at all Xaa locations
GRKPNPSARGGKAAKGEAPGTGSHYLLVLTPTPTNQPPLPAASPAAGGHGCKSPFIIMDDADVDHAVELAHFALFFNQGQCCCAGSRTFVHERVYDEFVEKAKARALKRVVGDPFRKGVEQGPQIDDEQFNKILRYIRXYGVDGGATLVTGGDRLGDKGFYIQPTIFSDVQDGMKIAQEEIFGPVQSILKFKDLNEVIKRANASQYGLAXAGVFTNSLDTANTLTRALRAGTVXWVNCFXDVFDAAIPXGGYKMSGI

SEQ ID NO: 11369 - protein, 225 aa, Glycine max
MLSISATRIFFLRSTTIRLSSSSSSLQFFSNPNRTLFRPFLHTSFKPLPSSFSFRTDHTMATSNAKSVHDFTVKDAKGNDINLGDYKGKVLIIVNVASQCGLTNSNYTELSQLYEKYKQKGLEILAFPCNQFGAQEPGSNEQIQEFVCTRFKAEFPVFDKVDVNGDKAAPLYKYLKSSKGGLLGDGIKWNFAKFLVDKEGNVVDRYAPTTSPLSIEKDLLKLLDA

SEQ ID NO: 11370 - protein, 311 aa, Prochlorococcus marinus str. MIT 9313
MHHRPTLASKPYGGLSWKKVLGLLAMDSPSTTANGWIDEHHQGVRYGLQGRVLVDETSPYQRITVIDSSRYGKGLLLDGCWMTAEHQERHYHESLVHPALCSAAQLERVLVIGGGDGGTARECLRYQDVKHLDMVEIDRRVVELSQKHLPSLGSHAWSDPRLQLNLENGIAWVANATESSYDVILIDGSDPAGPAEGLFNQTFFEHCRRILRPGGVFATQSESPEAFRQVHIDTVRLIRQVFGYADPLYGWVPMYPSGWWSWTFAAIDGPRYRNPLPARAAAISAGCEIWSPRWQQGAFEAIPAFIERELT

SEQ ID NO: 11371 - protein, 138 aa, Candida albicans SC5314
MQCSALRKNGHVVIKNRPCKIVDMSTSKTGKHGHAKVHLVAIDIFTGKKLEDLSPSTHNMEVPNVSRQEFQLLDIDDGYLSLMTADGDTKDDVKVPEGELGDKLQSEFDEGKDLIVTIISAMGEEAAISYKEAPKGSA

SEQ ID NO: 11372 - protein, 283 aa, Streptococcus pneumoniae R6
MATIQWFPGHMSKARRQVQENLKFVDFVTILVDARLPLSSQNPMLTKIVGDKPKLLILNKADLADPAMTKEWRQYFESQGIQTLAINSKEQVTVKVVTDAAKKLMADKIARQKERGIQIETLRTMIIGIPNAGKSTLMNRLAGKKIAVVGNKPGVTKGQQWLKTNKDLEILDTPGILWPKFEDETVALKLALTGAIKDQLLPMDEVTIFGINYFKEHYPEKLAERFKQMKIEEEAPVIIIDMTRALGFRDDYDRFYSLFVKEVRDGKLGNYTLDTLEDLDGND

SEQ ID NO: 11373 - protein, 296 aa, Thermotoga maritima MSB8
MRTLKELERELQPRQHLWYFEYYTGNNVGLFMKMNRVIYSGQSDIQRIDIFENPDLGVVFALDGITMTTEKDEFMYHEMLAHVPMFLHPNPKKVLIIGGGDGGTLREVLKHDSVEKAILCEVDGLVIEAARKYLKQTSCGFDDPRAEIVIANGAEYVRKFKNEFDVIIIDSTDPTAGQGGHLFTEEFYQACYDALKEDGVFSAETEDPFYDIGWFKLAYRRISKVFPITRVYLGFMTTYPSGMWSYTFASKGIDPIKDFDPEKVRKFNKELKYYNEEVHVASFALPNFVKKELGLM

SEQ ID NO: 11374 - protein, 371 aa, Eriobotrya japonica
MGKGGMSDGDHADRCCGEAINGDVQQENMAAWLLGVKNLKIQPYKLPNLGPHDVRVRLKAVGICGSDVHHFKNMRCVDFIVKEPMVIGHECAGIIEEVGSEVEDLVPGDRVALEPGISCKRCNLCKQGRYNLCRKMKFFGSPPNNGCLANQVVHPGDLCFKLPDNVSLEEGAMCEPLSVGIHACRRANVCQETNVLVVGAGPIGLVTLLAARAFGAPRIVIADVNDERLSIAKSLGADEVVKVSTNIEDLAEEVATIQKVLENGVDVSFDCAGFDKTITTALSATRPGGKVCLVGMGQREMTLPLATREIDVIGIFRYQNTWPLCLEFLRSGKIDVKPLITHRFGFSQKEVEEAFETSARGGNAIKVMFNL

SEQ ID NO: 11375 - protein, 365 aa, Aspergillus oryzae
MAEFVRAQIFGTTFEITSRYTELQPVGMGAFGLVCSARDQLTGQPVAVKKIMKPFSTPVLSKRTYRELKLLKHLRHENIISLSDIFISPLEDIYFVTELLGTDLHRLLTSRPLEKQFIQYFLYQILRGLKYVHSAGVVHRDLKPSNILINENCDLKICDFGLARIQDPQMTGYVSTRYYRAPEIMLTWQKYDVEVDIWSAACIFAEMLEGKPLFPGKDHVNQFSIITELLGTPPDDVIETICSENTLRFVKSLPKRERQPLATKFKNADPDAVDLLERMLVFDPKKRIRAGEALAHEYLAPYHDPTDEPVAEEKFDWSFNDADLPVDTWKIMMYSEILDFHNIDQGTEASQVLVEGAGDAQQNFV

SEQ ID NO: 11376 - protein, 220 aa, Porphyromonas gingivalis W83
MKFFIDTANLDQIREANDMGVLDGVTTNPSLMAKEGISGKDNCMRHYLAICEIVDGDVSAEVIATDYEGMIREGEELAALHPQIVVKVPCTAEGIKAIKYFSDKGIRTNCTLIFTVGQALLAAKAGASYVSPFVGRLDDIASDGIKLVENIVAMFGFYRYETEVLAASIRHTQHIIQCLEAGADVATCPLNAIKGLLKHPLTDSGLKAFLEDHRRVNEGK

SEQ ID NO: 11377 - protein, 77 aa, Zea mays
  unsure (1)..(77): unsure at all Xaa locations
SDRNAFRRNVEYACTAEEVQHHFQVXGTVNRATMLNXQVGQPKRVAHIELVRIGAFQETIHSGRIXLHGRHLKAAPQ

SEQ ID NO: 11378 - protein, 448 aa, Arabidopsis thaliana
MEQKFKTDSMNEDRISDLPDALLLQILSSLPTENAIATSVLSKRWRSLWTMLPKLKFDSNFNPVFDDDNIDPTMFSENVYKTLSLHKAPVLESLHLSFEGRTDCLHVGIWIATAFARGVRKLVLDSFYQEDQTVTLPSVLFSYNDSLEILKLKCAIDLDFPSRVCLKSLRKLYLDQVHFKDEESVCNLLCGCPSLQDLVVHRYSNADVATFTIASPSLQRLTIEDLRQEGGYGNGSYVINAPGLKYLNINGVIDIESCLIDKALELEEAKISNVSGITNENILESLTSAKRLILHLSPLEVKVPTGKIFDQLGCLELLTHEREWWNLLSIMLDSSPKLQILKLTDVYLHDNKTNPDERKWNPPKCAPECLLFHLETFLWIGYEWQRGDEKEVATYILENARRLKKATFSTKRIGREKLEDFEKRREMLNELAIVLWDSNSCHLVFEST

SEQ ID NO: 11379 - protein, 526 aa, Triticum aestivum
MSAIKPPPPDRPPQAARLPSPSSSSSAAAAAKQGGTGSRGLLMGRYELGRVLGKGTFAKVYHARHVQTGESVAIKVLDREKAVRSGLVSHIKREIAVLRRVRHPNIVHLFEVMATKTKIYFVMELLVRGGELFSRVSKGRLKEDIARRYFQHLISAVGFCHTRGVFHRDLKPENLLVDEAGNLKVSDFGLSAVAEPFQPEGLLHTFCGTPAYVAPEVLARRGYEGAKADIWSCGVILFVLMAGYLPFHDQNLMAMYRKVYKGEFRCPRWFSKDLTSLIMRFLDTNPSTRITLPEVMESRWFKKGFRPVKFYIEDDQLYNVIDAENDMLDLGLPDPLPQPLPPPPPSPSPQQVDGDDSGSESDASVVSCPATSSFEERHRLRGPLPRPASLNAFDIISFSRGFNLSGLFEEKGDEVRFISGEPMPDIITKLEEIANVKSFAVRKKDWRVSLEGTREGVKGPLTICAEIFELTPSLVVVEVKKKAGDKEEYDDFCNKELKPGMQHLVHQMVPVPNTPTISELAERPSR

SEQ ID NO: 11380 - protein, 183 aa, Erwinia carotovora subsp. atroseptica SCRI1043
MSTEIYAIPLTTIDGKATTFEAFKGQVALVVNVASKCGLTKQYDALEKLYETYRDKGLVVLGFPSNEFAGQEPGSEEEIQEFCRGTFGVQFPMFSKIEVNGENRHPLYQLLIRQQPEANGTWKSDFFARLVNKGRKPKNPEDILWNFEKFLVDREGRVIERFAPDMSPDHDTIVKAIEAALAK

SEQ ID NO: 11381 - protein, 159 aa, Streptococcus pyogenes M1 GAS
MPNLYDFTVKAQDGSDISLVDYKEKVVLVVNTATKCGLTPQYQALQALYDTYHDKGFEVLDFPCNQFLNQAPGDAEEINHFCSLTYHTTFPRFAKIKVNGKDADPLFTWLKEEKSGPLGKRIEWNFTKFLIDQNGQVIKRYSSKTDPKLIEEDLKALLG

SEQ ID NO: 11382 - protein, 451 aa, Synechococcus elongatus PCC 7942
MPSNTAAMLHVVQAIATTGANLTEMELLQRTNQWIDRRLIVEAASEEQAAAVVEAIAAVPDLELLDSEDRTFALHRGGKISVEPKLPLTSQAQLAMAYTPGVGRVCKAIAANPDRVYELTVKQNMVAIVTDGTAVLGLGNLGPAGALPVMEGKAMLFKAFGDVDAFPICLDTQDTDEIVETMKRIAPVFGGVNLEDIAAPRCFEIEARLKQELDIPVFHDDQHGTAIVTLAALENALKLVKKSLSQVRIVMNGAGAAGLSVASLLREAGATNIIICDSRGILSCDRSDLTPQKQAFAIEAGGSLADALVNADVFIGVSVPGVLTVEMVETMASDRIIFAMANPIPEIQPELIQGRAAVIATGRSDYPNQINNVLAFPGVFRGALDCRAKSLTSSMFLAAARAIAALVPPETLSAEHIVPSAFDSRVAPAVAAAVVEAAQANGLAQTLAVTH

SEQ ID NO: 11383 - protein, 339 aa, Desulfovibrio desulfuricans G20
MNLTEALLHALKERGAKEVYGIPGDFALPYFKIIESTGILPLVTLSHEPAVGFAADASARFRGGLGVAAVTYGAGALNMVNAIAQAYAEKSPVVVISGAPGTHEGGHGLLLHHQAKHLDSQYRMYKEVTCDQAVLDDPATAPETIARVLQSCIEHSRPVYLEIPRDLPAAPCAPVPAFAASGTDADAVDACARDVLQRVQSAALPMMMVGVEVRRYGIEDKVALLAERLGVPVVTSFMGRGLLASASCLEGTYLGMAGDETLSEAVESSDGLLLLGVIMSDTNFGVSGSQLDRRRVMHAEDRQVRVGYHVYHDIPLGALVDRLLALLDDGQEADMALSG

SEQ ID NO: 11384 - protein, 314 aa, Coccidioides posadasii
MASRHTTFRLNTGEDIPAIGFGTWQDENAQEDAVLTALSAGYRHIDTAAVYGTEKAIGRALARSRLSRDELFITSKLWNNKHRPEDVEQAIDQSLKNLEIDYLDLYLMHWPAAFAPGDDMFPKDSQGNSKTVDIDYVDTYKAMEKLVKSGKTKAIGISNFSKGEMERLLESCSIVPAVMQMELHPWLQQNDFVEWLKSKGIHVTQYSSLGNQNEVYSGRERYGRLIEDPALAAIGTKYGKTGAQVALAWGITKGHSVLVKSKTPHRIQQNFESDFELKQEDMKAIENIDKKLRFNDSSADFGYNFFVGLEGKEK

SEQ ID NO: 11385 - protein, 482 aa, Comamonas sp. NCIMB 9872
MNSSLHYNYVGGDWVNGATERHNLNPSDLSDSIGIYVGANEAQTQAAIDAAFDARTAWACWTAEQRADALDRIGTSILASAKELGHLLSREEGKTLAEGIGEAARAGRIFKYFAAEALRCGGDLLPAIRPGVSVEVTREPEGVVGIITPWNFPLAIPAWKIAPALAYGNTVVFKPADLVPGSAWALTEIIHRVGGLPPGVFNLVMGPGSKVGNTLANAPKVRALSFTGSATTGRQVGLACMERGAKVQMEMGGKNPLVVLNDADLQSAASVAIQGSFYSTGQRCTGSSRLIVEAGIHDAFVEAMRQQMSALSIGHALKQGTDIGPVASEDQLQQDLEYIRIGVAEGGRLYCGGSQLERETEGFYLSPALLTETDNSMRINREEIFGPVASVIRVGSYEEALHTANDTVFGLSSGICTTSLKYASDFKRRSAAGMVMVNVPTAGVDYHAPFGGRKGSSYGAREQGAYAREFYTVIKTAYTSAG

SEQ ID NO: 11386 - protein, 364 aa, Escherichia coli K12
MMSKNYHIAVLPGDGIGPEVMTQALKVLDAVRNRFAMRITTSHYDVGGAAIDNHGQPLPPATVEGCEQADAVLFGSVGGPKWEHLPPDQQPERGALLPLRKHFKLFSNLRPAKLYQGLEAFCPLRADIAANGFDILCVRELTGGIYFGQPKGREGSGQYEKAFDTEVYHRFEIERIARIAFESARKRRHKVTSIDKANVLQSSILWREIVNEIATEYPDVELAHMYIDNATMQLIKDPSQFDVLLCSNLFGDILSDECAMITGSMGMLPSASLNEQGFGLYEPAGGSAPDIAGKNIANPIAQILSLALLLRYSLDADDAACAIERAINRALEEGIRTGDLARGAAAVSTDEMGDIIARYVAEGV

SEQ ID NO: 11387 - protein, 363 aa, Buchnera aphidicola (Pemphigus spyrothecae)
MTKIYNLAILPGDGIGPELLQKDLNFKVLKEQYKLKINTTEYDIGGIAIDKYGKALPKETLDGCKESDSILFGSVGGPKWQHLPPDQQPERAALLPIRKYFNLFSNLRPAKLYSTLNHLSPLRRDISEKGFDILCVRELTGGIYFGKPKGYIKNIIDKKAFDTEIYYASEIKRIAHIGFKLAQNRKYKITSVDKANVLESSVLWRETVNTISKEYPDVKLSHLYIDHAAMQIIKNPDKFDVILTSNLFGDILSDECAMITGSIGMLPSASLNDSNFGLYEPAGGSAPDIAGKNIANPIAQILSIAMLVRYTMKLPMISDHIESAVIDTLKKGYRTLDIANDKEKYVSTNDIGDIISDILKKRI

SEQ ID NO: 11388 - protein, 140 aa, Brassica napus
  unsure (1)..(140): unsure at all Xaa locations
MSLPLTKEKAAFSPSDPAMQRHVASGRPSXXDGSDFSYRMVVESRXQRVAEGRSRLARLILVQALHLVAGGLLLLLSLSKGAAVNKFAVLSMAAGFLAIVVGELGRLRIMAVLLRLYTSLSSIAVAFSVTCIIRSELFLK

SEQ ID NO: 11389 - protein, 496 aa, Avicennia marina
MPTRQLFIDGEWREPVQRKRIPIINPANEQTIGDIPAATAEEMDIAVEAARKAFFRNSGKDWSSTTGAHRAKYLRAIAAKIKDRKVELVELEAIDSGKPLEEASLDMDNVIGCFEYFAGIAERLDSEQRTPVSLPMETFKCHLLKEPIGVVGLISPWNYPLLMAIWKVAPALASGCTAILKPSELASVTCLELAEVCMEVGLPPGVLNILTGLGPEAGAPLVTHPHVAKISFTGSDTTGVKIMTAAAQLVKPVTLELGGKSPIVVFEDVDLDTAAEWTLFGCFWTNGQICSATSRLLVHESIATTFLEKLVKWCEKIKISDPLEEGCRLGPIVSRRQYEKVMKYISTAKEEGATILCGGARPEHLEKGYFVQPTIITDVKTSMQIWIEEVFGPVLCVKTFATEDEAVELANDTHYGLAAAVISKDLDRCERMAKAFQVGAVWVNCSQPCFYQAPWGGKKRSGFGRELGERGLDIYLNVKQVTRYVSSEPWGWYKSP

SEQ ID NO: 11390 - protein, 165 aa, Staphylococcus aureus subsp. aureus COL
MNNRNVYDIEVSDYKGLTYKLEAFRGKVILVVNTATECIYSEQLKKLETLFQKYKDRGFVVLSFPNNNFDNRQPGSNEEILKISREKFGVTFPVLAKISVNGNDEHPLFTHLKNEQPGIFGSPIKWNFTKFIIDRQGNVVNRFLPMEDPLDISTNIEILLQESSS

SEQ ID NO: 11391 - protein, 246 aa, Brassica napus
MNIAHTIFGVFGNATALFLFLAPSITFKRIIKNKSTEQFSGIPYPMTLLNCLLSAWYGLPFVSKDNTLVSTINGTGALIERVYVLIFLFYAPKKEKAKIFGVFTAVLAVFATVALVSLFALHGNARKLFCGIAATVFSIIMYASPLSIMRLVIKTKSVEYMPFFLSLFVFLCGTSWFIYGLIGRDPFVAIPNGFGCALGTLQLILYIIYCGNKGEKSAEKDDKSLEMKGEEKKQNVVNGKQQEQQV

SEQ ID NO: 11392 - protein, 176 aa, Triticum aestivum
DAWARSVLHSTPHPTPARAGAMVALASLSSLCLCGAARRRSASAPTSISCCMLATPSGRGSHESRIPRRRFRRTEGATKSMEDSVKRKMEQFYEGVDGPPLRVLPIGGLGEIGMNCMLVGNCDRYILIDAGVMFPDYDEFGVQKIIPDTTFIKKWSHKIEAVIITHGHEDHILGYP

SEQ ID NO: 11393 - protein, 393 aa, Pseudomonas aeruginosa UCBPP-PA14
MLSNAQRALIKATVPLLETGGEALITHFYRTMLGEYPEVRPLFNQAHQASGDQPRALANGVLMYARHIDQLQELGPLVAKVVNKHVSLQVLPEHYPIVGTCLLRAIREVLGEQIATDEVLEAWGAAYQQLADLLIEAEESVYAASAQADGGWRGVRRFHVARKQAESEEITSFYLEPVDGQPLLAFQPGQYIGLRLDIDGEEVRRNYSLSAASNGREYRISVKREAGGRVSNHLHDRVAEGDELDLFPPAGDFVLRDSDKPLVLITAGVGITPALAMLQEALPQARPIRFIHCARHGGVHAFRDWIEDVSAQHEQVEHFFCYSEPRVGDSPDAEGVLSREKLADWLPQERDLDAYFLGPRPFMAQVKRHLADLGVPSQQCHYEFFGPAAALDA

SEQ ID NO: 11394 - protein, 102 aa, Glycine max
  unsure (1)..(102): unsure at all Xaa locations
MEPMDIVGKAKEDASLPKATMTKIIKEMLPPDVRVARDAQDLLIECCVXQDSLKGAKWSNRAEMTEEEALAEQQRMFAEARARMNGGAIPSKQPDAHQSLES

SEQ ID NO: 11395 - protein, 296 aa, Saccharomyces cerevisiae
MITTPLVHVASVEKGRSYEDFQKVYNAIALKLREDDEYDNYIGYGPVLVRLAWLISGTWDKHDNTGGSYGGTYRFKKEFNDPSNAGLQNGFKFLEPIHKEFPWISSGDLFSLGGVTAVQEMQGPKIPWRCGRVDTPEDTTPDNGRLPDADKDAGYVRTFFQRLNMNDREVVALMGAHALGKTHLKNSGYEGPWGAANNVFTNEFYLNLLNEDWKLEKNDANNEQWDSKSGYMMLPTDYSLIQDPKYLSIVKEYANDQDKFFKDFSKAFEKLLENGITFPKDAPSPFIFKTLEEQGL

SEQ ID NO: 11396 - protein, 447 aa, Ehrlichia canis str. Jake
MYKQSWKLLGRGQDADFTVAYINARIIDPESKLDIIGSLLTKGDKIVDFGQDLFNNGIPSTIDEVVDCNNNILMPGLIDIHVHFREPGQEHKETIHTGSKSAAAGGVTTVVCQPNTIPTISSIITAKYIKMRALESAYVNIEFYASITKPDNSLSDMALLKEAGAVGFTDDGMPVMNSLTMRQALSYSSMLDTVVAQHAEDLNLSNNGHINEGTVSYELGLKGIPDISESIIVNRDIALMKNIKNVHYHILHVSSQDSLNIIKQAKNQGLKVTCEVTPHHLTLTEQDVITHGTLAKINPPLRTENDRLSMVEGLKNGIIDCIATDHAPHEVNTKELPLDTAAFGIVGLETMLPISLELYHNGTISLIDLLATLTYKPANIIKVPRGRIKKGFVADLIILDLNHEWTIDILKFASKSKNSPFHNRKVKGKVLRTIVSGKTTYTAVRNI

SEQ ID NO: 11397 - protein, 288 aa, Pediococcus pentosaceus ATCC 25745
MNVFEESYKLSNGVKIPKLALGTWEIDDDQVADAVRSAIEMGYRHIDTAQAYANERGVGEGVRTASVPREEIFVNSKIAAEIKNYDDAKKSIDETLNKMGLDYLDMMIIHNPQPWAEVNQSDDRHFEGNLEVWRALEDAMHEGKLRAIGVSSFQKEDLDNLIKNSDTKPMVNQILSHIAATPMDLINYSHENGIVVEAFSPIAHGQALRSEAIQKMAAKYNVSAPQLSIRYDWQLDTVVLPKTSNPEHMKSNAELDFVISDEDMEILKQVKPLDYGDASVFPVFGGKM

SEQ ID NO: 11398 - protein, 388 aa, Arabidopsis thaliana
MDRISGLPDELLVKIISFVPTKVAVSTSILSKRWESLWKWVPKLECDCTEPALRDFILKNLPLQARIIESLYLRFRRESFLFQDIKLWGGIAISHCLRELRIDFFSHYANPYVILPRSLYTCKSLVTLKLLGLGIRVDVPRDVCLPSLKTLLLQCVAYSEEDPLRLLLSCCPVLEDLVIELDDANQNVKALVVIVPTLQCLSLKIPASCSDERYLIVTPSLKYFKVEDDREIFNALIENMPELEEADIYVTQHIETLLESVTSVKRLTLRQLYNSIDEYKCRAGIVFKQLEQLELSICSDNWTKLVIWLLQNSPNLRVLNLDADSDYERYEEYEQDNWKNIQRSVPKCLKSSLKTLEFAGYTARPEERDFLSFIFKKARCLKTSSISH

SEQ ID NO: 11399 - protein, 473 aa, Ralstonia eutropha JMP134
MKTLDRFYIQGEWVTPAAGSTLVDVINPATEAPVARLAMGTTADADRAVAAARDAFGTWSQSTREERIALLERIAEQYRARVPELAEAVRLEMGAPVTLCNAMQAPIGLVHIQNTLEVLRNFAFETTHGKTWLRREPVGVAALITPWNVPLNQIAAKVAPALAAGCTVVLKPSEIAPLDAVIFAEIMHAAGTPLGVFNMIFGDGPSVGAALSSHPDVDMVSITGSTRAGVEVAKNAAPTVKRVAQELGGKSPLVVLDDADMKTAVTTAVAQCMVNTGQVCVAPTRLLVSRTRYDEALAIAAATAGALQVGDPADPATKIGPLSNRAQFEKVQQMIGIGIEEGARVIAGGPGRPDGIERGFYVRPTVFADVHNSMTVAREEIFGPVLCVIPYDSEEDAIAIANDTVYGLAAYVASGDAERARRVAARLRAGTVRVNFAPADLTAPFGGVKRSGNGREFGAEGLVEFLEWKAISL

SEQ ID NO: 11400 - protein, 371 aa, Listeria monocytogenes str. 1/2a F6854
MDYEKALAFIKSNSTLEQEEGTEVIFKQAQETARGNLDPFLLKDLKQHLGGTNDAIKEAPQEIQMPDFSNLEIATAAALQMRATMGSPNIDLSNGVTTEYRVVEGDYGDIPVRIYRHEEATKPVPAFIFYHGGGFVGGTPAVVENFCKGIAEKLPAVVINVDYHLAPEFPAPAAPKDCYRVLEWVVEQSNELGIDASKIGVSGDSAGGTLAAAVSYMDYEAETNYVGFQALLYPALTLVDEDNEKYQWDISKFGASEDTLPLVAPGIIGMNSSGELLRTAYVRDENPAAPIYSPLSAVDKSIYPPTLIVSAEFDALRAFADVFAKELRASGVQTKAIVYQGMCHAFIDKYGIFPQAEDVADEIVQMMKEIF

SEQ ID NO: 11401 - protein, 223 aa, Thermoplasma acidophilum
MKIFLDTANIDEIRTGVNWGIVDGVTTNPTLISKEAVNGKKYGDIIREILKIVDGPVSVEVVSTKYEGMVEEARKIHGLGDNAVVKIPMTEDGLRAIKTLSSEHINTNCTLVFNPIQALLAAKAGATYVSPFVGRLDDIGEDGMQIIDMIRTIFNNYIIKTQILVASIRNPIHVLRSAVIGADVVTVPFNVLKSLMKHPKTDEGLAKFLEDWKKVSPDGKLIL

SEQ ID NO: 11402 - protein, 304 aa, Ustilago maydis 521
MIFAIKQPFVKTVKSNSYFSRYQVKYRRRREGRTDYYARKRLVSQAKNKYNAPKYRLVVRFSNRYVTCQIVHAKIVGDFVLTQASSKELPRYGVKTGLSNWTAAYATGLLVARRALTLLGLADKYEGVTEPDGEMAEVEPLGDDEPRPFKCFLDVGLKRTSTGSRVFGALKGASDGGIFIPHSEKRFPGFDPEAKELDAELLRSYIYGGHVAEYMESLEEEDDERFKKQFSTALEQDIGSEDLEDMWTEAFEKIREDPSFTPSDKSGKDWAAESKKYKATKLTYEQRKAKIADKIAAFKAGAEL

SEQ ID NO: 11403 - protein, 508 aa, Euphorbia characias
MGFARKEYEFLSEIGLSERNLGCYVNGTWKANGPVVTTSNPANNQAIAEVVEGSIEDYEEGMKACSEAAKIWMQVPAPKRGDIVRQIGDALRGKLEHLGRLVSLEMGKILAEGIGEVQEIIDMCDFCVGLSRQLNGSIIPSERPNHAMLEMWNPLGIVGVITAFNFPCAVLGWNACIALVCGNCAVWKGAPTTPLMTIATTKLVAEVLERNNLPLAIFTSFCGGADIGQAIAKDTRIPLVSFTGSSKVGLMVQQTVNQRYGKSLLELSGNNAIIVMDDADIPLAARSILFAAVGTAGQRCTTCRRLILHEKIYDTVLDQLLKSYKQVKIGDPLEKGTLLGPVHTAESRKNFEKGIELIKSQGGKILTGGSVIESEGNYVQPTIVEISSKAEVVKEELFAPVLYVMKFQTLEEAIEINNSVPQGLSSSIFTRRPDVIFKWLGPHGSDCGIVNVNIPTNGAEIGGAFGGEKATGGGREAGSDSWKQYMRASTCTINYGSELPLAQGINFG

SEQ ID NO: 11404 - protein, 271 aa, Oryza sativa (japonica cultivar-group)
MSPPLEPHDYIGLSAAAASPTPSSSSCSSSPNPGGEARGPRLTLRLGLPGSESPEREVVAAGLTLGPLPPTTTKAASKRAFPDSSPRHGASSGSVAAAAACQDKAAPAAAPPAAKAQVVGWPPVRNYRKNTLAASASKGKGEDKGTAEGGPLYVKVSMDGAPYLRKVDLKMYSSYEDLSMALEKMFSCFITGQSGLRKSSNRDRLTNGSKADALQDQEYVLTYEDKDADWMLVGDLPWDLFTTICRKLKIMRGSDAAGIAPRSIEQSGQSR

SEQ ID NO: 11405 - protein, 181 aa, Fagus sylvatica
MASSMISSATVATVSRATPAQATMVAPFTGLKSTAAFPATQKSNNDITSLASNGGRVQCMKVWPPLGLQKFETLSYLPPLSLESLAKQIEYLILKGWIPCLEFELEHPFVYRENNRSPGYYDGRYWVMWKLPMFGCTDATQVLAELQEASKTYPTSHIRIIGFDNKRQVQCISFIAYKPPK

SEQ ID NO: 11406 - protein, 315 aa, Oryza sativa (japonica cultivar-group)
MADHAAAEAAPQSSQEEEEDWKEAEGGDGDVEVADRGGGGGAANGGIPEGRPIRVYADGIYDLFHFGHAKSLEQAKRLFPNTYLLVGCCNDELTHKYKGRTVMTEDERYESLRHCKWVDEVIPDAPWVVTEEFLNKHNIDFVAHDSLPYADASGAGNDVYEFVKKLGKFKETQRTDGISTSDIIMRIVKDYNEYVMRNLARGYTRKDLGVSYVKEKRLRVNMGLKNLRDKVKQHQEKVGEKWNTMAKLQEEWVENADRWVAGFLEKFEEGCHSMGTAIKERIQERLKAQSRDFSLLQYDGEDVDEDEDDDEYVRE

SEQ ID NO: 11407 - protein, 342 aa, Haemophilus influenzae R2866
MKERIKAICLEKPNNVVVKEVPYPEKSDNDVLIQVESMGICGSDIGAYRGTNPLVTYPRILGHEIVGRVIESGIGMPDRVRVGDRVIVDPYVFCGQCYPCSIGRTNCCESLKVIGVHIDGGMQEVIRHPAHLLTKVPDNLPIHQLPLAEPLTIALHALHRTTLKSGEHIVIIGAGAIGLMAALAAVQYGAIPILVDILEQRLEYAKSLGIEHIVNPHKEDDIKRIKEITSGRMAEVVMEASGANISIKNTLHYTSFAGRIALTGWPKTETPLPTNLITFKELNIYGSRTSKGEFEEALDMLATNKINASHIITKCIKFEEIPSFISDLSDHPENYLKINAVF

SEQ ID NO: 11408 - protein, 488 aa, Listeria monocytogenes str. 4b F2365
MSIKETALPKVQTKLFINGKWTDGDNKETKDIVNPANGEVIAKIAQAGPNETKKAIKAAKEAFPDWAKMELADRVKLLHKIADLMEEKADTLAKIMTLEQGKPLKESKGEVLTGAENFRFAAEEARRLYGETIPAPNNHAFIVKKQPIGVVAAITPWNFPGGMVTRKLAPALATGNTIVLKPSGDTPLSALAIFEIFEEAGLPKGVANIVMGSSKEIGETLTDSDDVRKLTFTGSTKVGQTLFKQSAETLKKISLELGGHAPFIVFDDANLDAAVNDLVAAKFRNNGQVCVSPNRIFVAKEIKEKFTKALVAKVEQLKVGNGLDDVNVGPLIREDAIDKIDKQLKNATDKGAKVLTGGGRLTGSDYDKGNFYKPTVLDNVTREMDIFYEETFGPVIPLITFETEDEAIEMANDSEFGLASYFYTKDLARVEKVGAALEYGMVGANEIAISNPETPFGGVKHSGFGRENGHYGMEEYIQVKFINLKYRD

SEQ ID NO: 11409 - protein, 112 aa, Bartonella sp. Bi4298tl
ANEACLKMLQEIGSIKRIPKFIARAKDKNDPFRLIGFGHRVYKNYDPRAKIMQKTCHEVLKELNIQDDPLLDIAIELEKIALNDEYFIEKKLYPNVDFYSGIILKALGFPTE

SEQ ID NO: 11410 - protein, 185 aa, Triticum aestivum
  unsure (1)..(185): unsure at all Xaa locations
TTLDCGGGLGIDYDGTRSADSDISVAYGLEEYASSIVQAVRTTCDKAMVSHPVLCTESGQAMVSHHSMIILESLSAIPEPKDDDXDXTPEQLRTKIQHHYSCFQLADVRQQSWDLQEARDSRRYKLAKNSPKDFPATPHIYNXHMNSPSSPXLPDVWGIKWRSRLSCRSMRTYPNDTSTNCDSTA

SEQ ID NO: 11411 - protein, 112 aa, Bartonella sp. Rl5132tl
ANEACLKMLQEIGSIKRNPEFIARAKDKNDPFRLIGFGHRVYKNYDPRAKIMQKTCHKVLKELNIQDDPLLDIAIELEKIALSDEYFIEKKLYPKVDFYSGIILKALGLPTE

SEQ ID NO: 11412 - protein, 296 aa, Gloeobacter violaceus PCC 7421
MESEYSNLIQWYPGHIAKARRQLAEQLKQVDLVLEVLDARIAHSSRHDEIQKLAGERPRLVVLNRADMIPQGMLRSWLKWFAARGEAAYPTNAQNGDGVRAVLKAAQQGAVAVNQRRAGRGMRPRAVRVAVIGFPNVGKSALINRLVGKRAVESAAKPGVTRALRWVRIADVIDLLDSPGILPPRLNDQRAAAKLAICDDIGQAAYTTSRVATLAAELLTPLVPRRLAERFGADPLAVTAEEWLEQVARHKYHGNLDRAAEALLGDFRRGQLGAIALEAPPEEPLVPQAEAECEEG

SEQ ID NO: 11413 - protein, 235 aa, Glycine max
MTGTKRNQITTSPVGSPTSGNISDSYSSKEQDRFLPIANVSRIMKRALPANAKISKEAKETVQECVSEFISFITGEASDKCQREKRKTINGDDLLWAMTTLGFENYVGPLKLYLNNYRETEGEKSSTSMAKQEELHSPTHQHQTNIDGVVEINKLLPHSVAAATKASDFNNTTFSAGGFYSVGPHQVTAPKSFTEMGGLNGYRESSIAQSALSADQIQDASGNRMMPPILRYRVE

SEQ ID NO: 11414 - protein, 223 aa, Cucumis melo
MAAAPSVREENVYVAKLAEQAERYEEMVEFMEKVSASLDKEELTVEERNLLSVAYKNVIGARRASWRIISSIEQKEESRGNDDHVSVIRDYRSKIETELSNICDGILKLLDSRLIPSAASGDSKVFYLKMKGDYHRYLAEFKTGAERKEAAESTLTAYKAAQDIANAELPPTHPIRLGLALNFSVFYYEILNSPDRACSLAKQAFDEAIAELDTLGEESYKDS

SEQ ID NO: 11415 - protein, 112 aa, Bartonella sp. Bi4251tl
ANEACLKMLQEIDSVKRIPKFIARAKDKNDPFRLMGFGHRVYKNYDPRAKIMQQTCHEVLKELNIQDDPLLDIAIELEKIALNDEYFVEKKLYPNVDFYSGITLKALGFPTE

SEQ ID NO: 11416 - protein, 160 aa, Thermoplasma acidophilum DSM 1728
MVFKRKEAGITDYSKRLKLLKSREKRFIVRITGKGVIAQVAEYSDIGDRILFTVTDKTLAKYGVDLRGNNIQVCYLVGYIAGIESEKNGVESAVLDTGRRKFRKGGRIAACLKGFTDAGIEVPHGEDVFPDKKRIDGKHLKSPVKISEIVKNFKKMEEKA

SEQ ID NO: 11417 - protein, 506 aa, Pseudomonas fluorescens PfO-1
MRYAHPGTEGAKVSFKSKYGNYIGGEFVAPVKGQYFTNTSPVNGQPIAEFPRSTAEDIEKALDAAHAAADAWGSTSAQARSLILLKIADRIEQNLETLAIIETWDNGKAIRETLNADIPLAADHFRYFAGCLRAQEGSAAEIDGNTVAYHIHEPLGVVGQIIPWNFPILMAAWKLAPALAAGNCVVLKPAEQTPLGISVLLELIGDLLPPGVLNVVQGFGKEAGEALATSKRIAKIAFTGSTPVGSHIMKCAAENIIPSTVELGGKSPNIFFEDIMQAEPSFIEKAAEGLVLAFFNQGEVCTCPSRALVQESIYPQFMEAVMKKVSQIKRGDPLDTDTMVGAQASEQQFDKILSYLEIAKGEGAELLTGGKVEKLEGSLATGYYIQPTLLKGTNKMRVFQEEIFGPVVSITTFKDEAEALAIANDTEFGLGAGLWTRDINRAYRMGRAIKAGRVWTNCYHLYPAHAAFGGYKKSGVGRETHKMMLDHYQQTKNLLVSYDINPLGFF

SEQ ID NO: 11418 - protein, 433 aa, Ralstonia eutropha JMP134
MTPSDVKATLSFSDGSPSVELPIYKGTVGPDVIDIRKLYGQTGKFTYDPGFMSTASCNSKITYIDGDKGELLYRGYPIEQLAQKCDHLETCYLLLKGELPNAKQKEEFTGHVMNHTMVHEQLQFFLRGFRRDAHPMAVLTGLVGAMSAFYHDAMDIDDPHQREISAIRLIAKMPTMVAMAYKYNIGQPYIYPQNDLSYSGNFLRMLFGTPCAPYTVNPVLERALDRIFILHADHEQNASTSTVRLAGSSGTNPFAAIAAGVACLWGPAHGGANEAALKMLEEIGSVDNIGEFIKQVKDKNSGVRLMGFGHRVYKNYDPRAKLMRETCHEVLNELGLHNDPLFKLAMELEKIALEDEYFVSRKLYPNVDFYSGIVQRALGIPTSLFTCIFALARTPGWISQWEEMITDPEYKIGRPRQLFNGAASRDVPDISKR

SEQ ID NO: 11419 - protein, 411 aa, Anaplasma platys
MKENAVLMCGDKKVSLPMLSGTDGIQLIDITTLYRDHKVLTYDPGFMSTAACSSEITFIDGEKGILRHRGLDIADLIGIKGGFCSVAHLLLYGVLPSDTVFEQFLAAIGAQHALSSDVLGVISSFRRDAHPMAILMACFSTLAAKYHGDNRGNEELAVLAIAQVPSLVAAIYLHRMGLELVSPDPSLSYTGNFVKMMFGALEKTRADAIEEALDAIFIMHADHEQNASTATVRMAGSAGTELFACLAAGTATLWGPAHGGANEAVIRMLESIGSPDKVEEFIGFVKDNNSKVRLMGFGHRVYKSYDPRAKILGQISRSVLDNLGCSDELLGVAEELERCALQDEYFVERKLYPNVDFYSGIVLRAMGVPVEMYTTFFALARTAGWVSQWCELLRGSESLKICRPRQLYAGK

SEQ ID NO: 11420 - protein, 367 aa, Bacillus megaterium
MTKKVAVLPGDGGQSNQRRCCRLKAIGERLRHQFEFTYGLIGGAAIDEAGSSSSRSTIETCNEADAVLLGSVGGPKWDRFPSHLRPEKGLLAIRKELDLYANLRPVTFYDSLADASPLKKEYIEGVDFIIVRELTGGLYFGKPSDRRTEGNKETVVDTLFYKRTEIERIIASIDTAVNRRKKVTSVDKANVLESSRVWREVAEEVAKDYPDVELEHMLVDSAAMQLIRNPKYFDVVVTENMFGDILSDEASMLTGSLGMLPSASLTADGPSLYEPVHGSAPDIAGQNKANPIAAAILSAAMLLRHSFGLEKEAAVIEQAVESVLHAGHRTADLADGNHYLGTDKMVEVITAVIANDSAISSIMTASR

SEQ ID NO: 11421 - protein, 474 aa, ASPERGILLUS NIDULANS FGSC A4
MASTLRLSTSALRSSTLAGKPVVQSVAFNGLRCYSTGKTKSLKETFADKLPGELEKVKKLRKEHGNKVIGELTLDQAYGGARGVKCLVWEGSVLDSEEGIRFRGLTIPECQKLLPKAPGGEEPLPEGLFWLLLTGEVPSEQQVRDLSAEWAARSDLPKFIEELIDRCPSTLHPMAQFSLAVTALEHESAFAKAYAKGINKKEYWHYTFEDSMDLIAKLPTIAAKIYRNVFKDGKVAPIQKDKDYSYNLANQLGFADNKDFVELMRLYLTIHSDHEGGNVSAHTTHLVGSALSSPMLSLAAGLNGLAGPLHGLANQEVLNWLTEMKKVVGNDLSDQSIKDYLWSTLNAGRVVPGYGHAVLRKTDPRYTSQREFALRKLPDDPMFKLVSQVYKIAPGVLTEHGKTKNPYPNVDAHSGVLLQYYGLTEANYYTVLFGVSRALGVLPQLIIDRAFGAPIERPKSFSTEAYAKLVGAKL

SEQ ID NO: 11422 - protein, 306 aa, Hevea brasiliensis
MPSHGDLDRQIEHLMECKPLPEARGQTLCDQARAILVEEWNVQPVKCPVTVCGDIHGQFYDLIELFRIGGNAPDTNYLFMGDYVDRGYYSVETVTLLVALKVRYRDRITILRGNHESRQITQVYGFYDECLRKYGNANVWKYFTDLFDYLPLTALIESQIFCLHGGLSPSLDTLDNIRALDRIQEVPHEGPMCDLLWSDPDDRCGWGISPRGAGYTFGQDIAAQFNHTNGLTLISRAHQLVMEGYNWCQEKNVVTVFSAPNYCYRCGIMAAILEIGENMAQNFLQFDPAPRQIEPDTTRKTPDYFL

SEQ ID NO: 11423 - protein, 118 aa, Glycine max
MATLDSDVTVFPAGEASSSAGPSSSTKKPKRFEIKKWNAVSLWAWDIVVDNCAICRNHIMDLCIECQANQASATSEECTVAWGVCNHAFHFHCISRWLKTRQVCPLDNSEWEFQKYGH

SEQ ID NO: 11424 - protein, 393 aa, Ralstonia eutropha JMP134
MSAANHTTPADAPQSAGPKPKKSVALSGVTAGNTALCTVGRTGNDLHYRGYDILDVADACEFEEIAHLLVHGKLPNRAELAAYKTKLKSLRGLPANVKAALEWVPASAHPMDVMRTGVSVLGTVLPEKDDHNAPGARDIADRLMASLGSMLLYWYHYSHNGRRIEVETDDDSIGAHFLHLLHGEKPSKLWERAMHTSMILYAEHEFNASTFTGRVIAGTGSDMYSAICGAIGALRGPKHGGANEVAFEIQKRYDSPDEAQADIARRVENKEVVIGFGHPVYTIADPRNQVIKETARNLSKDAGSMKMFDIAERLETVMWDIKKMFPNLDWFSAVSYHMMGVPTAMFTPLFVIARTSGWAAHIIEQRIDNKIIRPSANYTGPEDLKFVPIGKRK

SEQ ID NO: 11425 - protein, 346 aa, Shigella flexneri 2a str. 301
MKSVVNDTDGIVRVAKSVIPEIKHQDEVRVKIASSGLCGSDLPRIFKNGAHYYPITLGHEFSGYIDAVGSGVDDLHPGDAVACVPLLPCFTCPECLKGFYSQCAKYDFIGSRRDGGFAEYIVVKRKNVFALPTDMPIEDGAFIEPITVGLHAFHLAQGCENKNVIIIGAGTIGLLAIQCAVALGAKSVTAIDISSEKLALAKSFGAMQTFNSSEMSAPQMQSVLRELRFNQLILETAGVPQTVELAVEIAGPHAQLALVGTLHQDLHLTSATFGKILRKELTVIGSWMNYSSPWPGQEWETASRLLTERKLSLEPLIAHRGSFESFTQAVRDIARNAMQGKVLLIP

SEQ ID NO: 11426 - protein, 221 aa, Brassica napus
  unsure (1)..(221): unsure at all Xaa locations
METLATDPGFIDSGVYLRLGLIVEGKIRLKKPPTLLSRLASSLERSLLLHDESPPEFQHSAVTVFDGRSPPEITISDYLDRIFIYSRCSPSCFVAAYIYILQFLDVTRAHLTPLNVHRLXVTSVMLAAKVFDDRYYNNAYYARVGGVSPRELNRLEMKLLFALDFKLQVDPHTFHAHCCQLEKQNSDGIQIEWPIKEACRLDKETWRKSTPESVCSQTTAR

SEQ ID NO: 11427 - protein, 418 aa, Bordetella parapertussis 12822
MSYQHIKVPTGGQKITVNADYSLNVPDQVIIPVIEGDGTGADITPVMIKVVDAAVQKAYAGKRKIHWMEVYAGEKATKVYGPDVWLPEETLDAVKDYVVSIKGPLTTPVGGGIRSLNVALRQQLDLYVCLRPVRYFKGVPSPVREPEKTDMVIFRENSEDIYAGIEYMAESEQAKDLIQYLQTKLGATKIRFPNTSSIGIKPVSREGTERLVRKALQYAIDNDRASVTLVHKGNIMKFTEGGFRDWGYALAQNEFGAQPIDGGPWCKFKNPKTGREIIVKDSIADAFLQQILLRPAEYDVIATLNLNGDYISDALAAQVGGIGIAPGANLSDSVAMFEATHGTAPKYAGKDYVNPGSEILSAEMMLRHMGWTEAADLIIASMEKSILSKKVTYDFARLLEGATQVSCSGFGQVMIDNM

SEQ ID NO: 11428 - protein, 278 aa, Glycine max
MGVFSEDPNPNPNPIVIREVWASNLESEFELIRELIDRYPFISMDTEFPGVIFRPHVDPTKPFNHRNRPSDHYRLLKSNVDALNLIQVGLTLTDAAGNLPDLAGNRSIWEFNFRDFDVARDAYAPDSIDLLRRQGIDFARNTADGVDSTRFAELMMSSGLVCNDSVSWVTFHSAYDFGYLVKILTRRNLPTRLEEFLKTVKVFFGDNVYDVKHMMRFCDTLYGGLDRVARTLNVERAVGKCHQAGSDSLLTWHAFQKIVDIYFVKDEHRKHAGVLYGL

SEQ ID NO: 11429 - protein, 165 aa, Triticum aestivum
  unsure (1)..(165): unsure at all Xaa locations
MAPTVMASSATSVAPFQGLKSTAGLPVSRRSNGASLGSVSNGGRIRCMQVWPIEGIKXFETLSYLPPLSTEXLLKXVDYLXRSKWVPCLQFNKVGFIFPXAQPSPGYYXGXYWTIWNCLCSGXTEATQVXTSGRSRRIPDPIPITVSQVILTHPQLKIRKLITSI

SEQ ID NO: 11430 - protein, 101 aa, Glycine max
MSGRVSGKVKWFNDQKGFGFITPDDGSEELFVHQSQIKSDGFRSLAEGESVEFAIESESDGRAKAVDVTGPDGASVQGTRRGGGDRYGGSGGGGGRYGGGA

SEQ ID NO: 11431 - protein, 174 aa, Triticum aestivum
  unsure (1)..(174): unsure at all Xaa locations
MPESDNDSGGPSNTGGEGELSSPREQDRFLPIANVSRIMKKALPANAKISKDAKETVQECVSEFISFITGEASDKCQREKRKTXINGDDLLWAMTTLGFEDYVDPLKHYLHKFREIEGERAAATSTSTTPHLPDNNATGYADYGGADVPAPGPGRHEDDGPPHLPLHASAAPSN

SEQ ID NO: 11432 - protein, 116 aa, Brassica napus
MGSTPAEVPCEDVADNRSGVGGGISDVYGEDLATLDQLVTPWVTSVASGYSLMRDPRYNKGLAFTDKERDAHYLTGLLPPVVISQEVQERKLMHNLRQYTVPLQRYMALMDLQEKE

SEQ ID NO: 11433 - protein, 301 aa, Zea mays
MAGLSLEHPWAFAFGLLGNVISFMTFLAPIPTFYRIYKSKSTEGFQSVPYVVALFSAMLWIFYALIKSNETFLITINAAGCVIETIYIVMYFVYAPKKAKLFTAKIMALVNGGVFGVILLLTLLLFKGSKRVVLLGWICVGFSVSVFVAPLSIMRRVIQTKSVEYMPFSLSLSLTLSAVVWFLYGLLIKDKYVALPNVLGFIFGVVQMVLYVLYMNKTPVAAAVGKDAGKLPSAADEHVLVNIAKLNPALPERTSGMHPVTQMAAVPARSCAAEATAPAMLPNRDVVDVFVSRHSPAVHVV

SEQ ID NO: 11434 - protein, 185 aa, Brassica napus
MSCTATDLAVLLGPNATAAADYICGQLGTVNSKFTDVAFAVDNTYLLFSAYLVFSMQLGFAMLCAGSVRAKTTMNIMLTMTNVLDAAAGGLFYYLFGYAFAFGSPSNGFIGKHNFGLKDFPSASADYSNFLYQWAFAIAAAGITSGSIAERTQFVAYLIYSSFLTGFVYPVVSHWFWSVDGWASP

SEQ ID NO: 11435 - protein, 449 aa, Pyrococcus furiosus DSM 3638
MDKRSQKTYKGFYRTLEIQKKFKNQDLSNQILVISMEVVLEGKFLLDKRTIEGYIGIEDGKISKISLREIKGDHKIKVDKGKVILPGLIDVHVHLRDFEESYKESIESGTKAAVHGGITVVFDMPNTKPPIMDEKTLKLREHLFKRKSYADYALGFLLAGNKPVEADFYKIFMGASTGGIYSKNFEEDYIRALDIVSIHAEDYEIIQKYPERPPIAEIRAIERVIEAVKTHKKPAHICHISTAKGLKLLLDSRLEMLSFEVTPHHLFLTRSDYDKNPLLKVYPPLRSEEDRIALWKNIDKVPVIASDHAPHTLEDKEAGAAGLPGLETEVPLLLDAVNKGLITLQDIVEKMHINPIKIFGIENKGFEKGKDADFTIVDMKREWTIRADNLYTKAGWTPYEGWRVKGKVIMTIIRGEVVMEEDEIIGKPRGERIVKKGKHRRNLGSSEEH

SEQ ID NO: 11436 - protein, 194 aa, Zea mays
ILRTNAHRSSGLSNFFVSSNAGVALYIFLIILPFLVLCPLRYYHQKHPVNLLLLGLFTVAISFAVGMTCAFTSGKIILEAAILTAVVVISLTAYTFWAAKRGHDFNFLGPFLFAAIMVLMVFSLIQIFFPLGKISVMIYGGLASLIFCGYIIYDTDNVIKRYTYDEYIWAAVSLYLDVINLFLSLLQLLRAADS

SEQ ID NO: 11437 - protein, 492 aa, Thermobifida fusca
MSISSERIAALRDYVPEVRELTIDGKPVKPAGETWDVYNPATEEVIATVSGATKEQVDEAIRAARTAFDTWSKMSGEERSAAMHSLADRLEARWEELLASIVNEVGTPVSTAEFLQVKMGLGHLRWFADAAKKDRTVHLGPYDVPVPTMSDVDHYPVGVVAAITGYNYPLNLAGFKYGAALAAGCTVVLLPSPRTPLTTLLLGEIIRESDLPDGVINVVLGGADIGQYLSSHPGVDKVSFTGSDAVGAKIMEQAAANLNDVVLELGGKSANIVLPGCDVESFAVDMHMRWSRNSGQGCAALARLLVHEDLFDRFMKAGAEAFPKMKVGDPWDPETHIGPLIRPDHRDRVNGFITEALEQGGKALLQVETPLPEKGWYVNPILLGNLPHSARAVQQEIFGPVAVVLTYKDVDEAIRLANDTAYGLAANVWAPTLEEGRRVAEQLRAGTVWINGGGAMRPDAPFGGSGRSGIGRELGEWGIQEFLEPRHIQWAL

SEQ ID NO: 11438 - protein, 165 aa, Aegilops speltoides
VMASSATTVAPFQGLKSTAGLPVGRRSSGSLGSVSNGGRIRCMQVWPIEGIKKFETLSYLPPLSTEALLKQVDYLIRSKWVPCLEFSKVGFVFREHNSSPGYYDGRYWTMWKLPMFGCTDATQVLSEVEEVKKEYPDAYVRVIGFDNLRQVQCVSFIAFRPPGCE

SEQ ID NO: 11439 - protein, 54 aa, Zea mays
MSTATFVDIIIAILLPPLGVFLRFGCGVEFWICLVLTLLGYIPGIIYAIYVLTK

SEQ ID NO: 11440 - protein, 165 aa, Aegilops sharonensis
VMASSATTVAPFQGLKSTAGLPVSRRSSASLGSVSNGGRIRYMQVWPIEGIKKFETLSYLPPLSTEALLKQVDYLIRSKWVPCLEFSKVGFVFREHNSSPGYYDGRYWTMWKLPMFGCTDATQVLNEVEEVKKEYPDAYVRVIGFDNLRQVQCVSFIAFRPPGCE

SEQ ID NO: 11441 - protein, 164 aa, Aegilops bicornis
VMASSATSVAPFQGLKSTGGLPVSRRSRGSLGSVSNGGRIRCMQVWPIEGIKKFETLSYLPPLSTEALLKQVDYLIRSKWVPCLEFSKVGFVFREHNSSPGYYDSRYWTMWKLPMFGCTDATQVLNEVEEVKKEYPDAYVRVIGFDNLRQVQCVSFIAFRPPGC

SEQ ID NO: 11442 - protein, 196 aa, Triticum aestivum
MPDSDNDSGGPSNADFSSPKEQDRFLPIANVSRIMKKALPANAKISKDAKETVQECVSEFISFITGEASDKCQREKRKTINGDDLLWAMTTLGFEDYMEPLKLYLHKFRELEGEKAGGEAGGYGGMYGGAGAGGSGGGMFMMMGQPMYGSPPAAGYQHPQHHHQMMTGGQGGYGYGDAGAGGGSSSSSGFGRQDRA

SEQ ID NO: 11443 - protein, 352 aa, Enterococcus avium
MSKTMKGVSKQAPGYDQMAFIDLSVPEATDDKVLIKVAYTGICGSDIHTFKGEYKNPTTPVVLGHEFSGQVVEVGANVPKVKVGDRVTSETTFYVCGECDYCKEKQYNLCPHRKGIGTQQNGSMANYVLAREESIHLLPDHLSYEGAAMSEPLACCVHAMYQKSHLELKDTIIIMGPGPIGLYLLQIAKEIGAFVIMTGITKDAHRLALAKKLGADVIVDTMKEDLAKVVNEITDGYGVDKVYDASGAVPAVNASLPLIRKQGQFIQVGLFANKMVDLDTESIIQREIEYIGSRSQNPYDWPIAIHLLAKGAINIDEMITKKYPLTEWREAFDKVMEGNEIKVMIESNPEEF

SEQ ID NO: 11444 - protein, 296 aa, Saccharomyces cerevisiae
MITTPLVHVASVEKGRSYEDFQKVYNAIALKLREDDEYDNYIGYGPVLVKLAWHISGTWDKHDNTGGSYGGTYRFKKEFNDPSNAGLQNGFKFLEPIHKEFPWISSGDLFSLGGVTAVQEMQGPKIPWRCGRVDTPEDTTPDNGRLPDADKDAGYVRTFFQRLNMNDREVVALMGAHALGKTHLKNSGYEGPWGAANNVFTNEFYLNLLNEDWKLEKNDANNEQWDSKSGYMMLPTDYSLIQDPKYLSIVKEYANDQDKFFKDFSKAFEKLLENGITFPKDAPSPFIFKTLEEQGL

SEQ ID NO: 11445 - protein, 188 aa, Zea mays
  unsure (1)..(188): unsure at all Xaa locations
MARRTRFVAIAALLTSFLNVAAGHPRPLSGAGLPGDLFGLGIASRIRTDSNSTAKAATDFGQMVRAAPEAVFHPATPADIAALVRFSATSAAPFPVAPRGQGHSWRGQALAPGGVVVDMGSLGRGPRINVSAVAGAEPFVDAGGEQMWVEVLRATLGPXVLMPRERTEYLRLTVSXTLSNAIIYEKEF

SEQ ID NO: 11446 - protein, 474 aa, Azoarcus sp. EbN1
MQVFDMIINGKPVRAGSTFDVVNPATGEVFARVQAGDASHVDQAVAAARAAFPGWSRTPDAERKRLMHALGAALEAHMPELMELVTKEAGKPLGGLNGVGSGMEVGGAIAWTHVTADLELPVEVIQDNDDARIEVHRKPLGVVGSITPWNWPLMIAIWHVIPALRAGNTVVIKPSGMTPTATIRFVELANAILPPGVLNIVTGESGVGSAIAKHPDINKIVFTGSTPTGKNIMQNAAGNLKRLTLELGGNDAGIVLPDVDPKAIAPKLFGVGFHNNGQTCACLKRLYVHDSIYEKVCAELARIAKETVVGDGLVEGTELGPVQNKAQLDFVQELVEDARAHGARILSGGKARSGGGFFFEPTVIADAKDGMRVVDEEQFGPVLPVIRYSDIEEVIARANNNENGLGGSIWSKDHAKAAELALRLECGTAWVNEHGAVQPDAPFGGVKQSGLGVEFGRYGLEEYTSIQTLKIMKA

SEQ ID NO: 11447 - protein, 136 aa, Brassica napus
RKVTAFLGGIHLCDGRYDTPEHRILHDLDTVFKDDFHNPTYPVGTKAPRQPWHDLHCRLQGPAAYDVLTNFAQPRTKATRWKEFSLRLKGKTHWQDDALIRIGRISWILSPVFKYLKDGTNMVPEDDPIVYVSKED

SEQ ID NO: 11448 - protein, 171 aa, Triticum aestivum
RFKCFPPIRDAANKENLWEALLDGHIDMLSSDHSPSTPDLKLEGERDSVSARGGISSLQFVLPVTWSHGKKYGITLNQLASWWSEKPAELAGQKNKGSILPGYHADIVVWKPEVQFHLDDTHAVYHKHRNISAYIGKELSGKVLSTFVRGNLVFAEGKHAGAACGATILAK

SEQ ID NO: 11449 - protein, 508 aa, Burkholderia cepacia R18194
MNPFDLKQLGLDVEYPYRQQYDNYIGGKWVPPVKGEYFENVSPINGQPFCRIPRSGTDDIELALDAAHAARRKWGKTSVAERANLLLAAADRMEKNLKLLAVAETIDNGKPLRETMAADLPLAVDHFRYFAGCIRAQEGGISEIDDNTVAYHFHEPLGVVGQIIPWNFPLLMAAWKLAPALAAGCCVVMKPAEQTPASVLVLMELIGDLFPAGTINIVNGFGKEAGEALATSKRIAKIAFTGSTPVGKHILRAAADSLIPSTVELGGKSPNIFFADVLDQDDAFLDKALEGLAMFALNQGEVCTCPSRILIQESIYEKFIEKAVARVERIKAGHPLDLQTMIGAQASQQQLDKILSYIDIGRGEGAQCLTGGERTAPAAELGTGYYVKPTMLLGNNKMRVFQEEIFGPVASVMTFKDEQDAIELANDTFYGLGAGVWTRNGTRAYRMGREVEAGRVWTNCYHLYPAHAAFGGYKQSGIGRETHKMALSNYQQTKCLLVSYQAEALGFF

SEQ ID NO: 11450 - protein, 275 aa, Escherichia coli
MANPTVIKLQDGNVMPQLGLGVWQASNEEVITAIQKALEVGYRSIDTAAAYKNEEGVGKALKNASVNREELFITTKLWNDDHKRPREALLDSLKKLQLDYIDLYLMHWPVPAIDHYVEAWKGMIELQKEGLIKSIGVCNFQIHHLQRLIDETGVTPVINQIELHPLMQQRQLHAWNATHKIQTESWSPLAQGGKGVFDQKVIRDLADKYGKTPAQIVIRWHLDSGLVVIPKSVTPSRIAENFDVWDFRLDKDELGEIAKLDQGKRLGPDPDQFGG

SEQ ID NO: 11451 - protein, 298 aa, Thermotoga maritima MSB8
MGSDKIHHHHHHMQVPKVTLNNGVEMPILGYGVFQIPPEKTEECVYEAIKVGYRLIDTAASYMNEEGVGRAIKRAIDEGIVRREELFVTTKLWVSDVGYESTKKAFEKSLKKLQLEYIDLYLIHQPFGDVHCAWKAMEEMYKDGLVRAIGVSNFYPDRLMDLMVHHEIVPAVNQIEIHPFYQRQEEIEFMRNYNIQPEAWGPFAEGRKNIFQNGVLRSIAEKYGKTVAQVILRWLTQKGIVAIPKTVRRERMKENISIFDFELTQEDMEKIATLDEGQSAFFSHRDPEVVKWICSLKR

SEQ ID NO: 11452 - protein, 452 aa, Staphylococcus aureus subsp. aureus MRSA252
MNYTQQLKQKDSEYVWHPFTQMGVYSKEEAIIIEKGKGSYLYDTNGNKYLDGYASLWVNVHGHNNKYLNKVIKKQLNKIAHSTLLGSSNIPSIELAEKLIEITPSNLRKVFYSDTGSASVEIAIKMAYQYWKNIDREKYAKKNKFITLNHGYHGDTIGAVSVGGIKTFHKIFKDLIFENIQVESPSFYRSNYDTENEMMTAILTNIEQILIERNDEIAGFILEPLIQGATGLFVHPKGFLKEVEKLCKKYDVLLICDEVAVGFGRTGKMFACNHEDVQPDIMCLGKAITGGYLPLAATLTSQKIYNAFLSDSHGVNTFFHGHTYTGNQIVCTVALENIRLYEKCKLLSQIETTSSTLEKQLHALKRHRNVGDVRGRGLMFGVELVTDKDSKTPLEIEKVERIVRNCKENGLMIRNLENVITFVPVLSMSNKEVKTMVRIFKKAVHNILDRKC

SEQ ID NO: 11453 - protein, 364 aa, Zea mays
MGSTAGDVAAVVDEEACMYAMQLASSSILPMTLKNAIELGLLEVLQKEAGGGKAALAPEEVVARMPAAPSDPAAAAAMVDRMLRLLASYDVVRCQMEDRDGRYERRYSAAPVCKWLTPNEDGVSMAALALMNQDKVLMESWYYLKDAVLDGGIPFNKAYGMTAFEYHGTDPRFNRVFNEGMKNHSVIITKKLLDFYTGFEGVSTLVDVGGGVGATLHAITSRHPHISGVNFDLPHVISEAPPFPGVRHVGGDMFASVPAGDAILMKWILHDWSDAHCATLLKNCYDALPENGKVIVVECVLPVNTEATPKAQGVFHVDMIMLAHNPGGKERYEREFRELAKGAGFSGFKATYIYANAWAIEFIK

SEQ ID NO: 11454 - protein, 53 aa, Glycine max
HWDLPRTREGFYRFKGSETASGVRGCAFSAHADVIWMETAPPNVDECTSYARG

SEQ ID NO: 11455 - protein, 159 aa, Triticum aestivum
  unsure (1)..(159): unsure at all Xaa locations
MAPTVMASSATSVAPFQGLKSTAGLPVSRRSNGASLGSVSNGGRIRCMQVWPIEGIKNSETLSYLPPLSTEXLLKQVDYLIPSKWVLAXRFSKVGSSSRXAQPSPGYYDGRYWTCWNCYVPGALTHTXINEVEESRRXPDPIPHRFHKSQVHAHSPSTT

SEQ ID NO: 11456 - protein, 284 aa, Triticum aestivum
AAAAIAGAFLRLAGRPAVLPSNNLSYSENFLYMLDSLGDKEYKPNPRLARVLDILFILHAEHEMNCSTAAVRHLASSGVDVFTALSGAVGALYGPLHGGANEAVLKMLNEMGAVENIPDFIEGVKNRKRKMSGFGHRVYKNYDPRAKVIRKLAEEVFSIVGRDPLIEVAVALEKAALSDEYFIKRKLYPNVDFYSGLIYRAMGFPTEFFPVLFAIPRMAGWLAHWKESLDDPDNKIMRPQQVYTGVWLRHYTPVRERVASNQGEELGQIATSNATRRRRAGSSL

SEQ ID NO: 11457 - protein, 427 aa, Haemophilus somnus 2336
MSKLTAKLTLSDGREFDLNVQQGTLGYDAVDVQPLVKNKLFTFDPGFMSTASCVSEITYIDGDNGILLHRGYPIADLAKNADYLEVAHLLLFGERPNKEEYANFIKLVKNHTLVHEQISRFFHGFRRDSHPMAIMCGVSGALAAFYHDSLDINDIEHRELTAIRLLAKMPTLAAMCYKYSIGQPFMFPLNKLSYAGNFLYMMFATPCEPYEVNPVLEKAMDRIFILHADHEQNASTSTVRTAASSGANPFACIAAGIASLWGPAHGGANEACINMLEEIGSVDRIPEYIARAKDKNDPFRLMGFGHRVYKNYDPRAKVMRQTCHEVLKELNIQTPLFDVAMELERIALNDPYFIDHKLYPNVDFYSGIILKAIGIPTSMFTVIFALARTVGWIAHWKEMFKPGNMKIVRPRQLYKGHTERKFDAIEK

SEQ ID NO: 11458 - protein, 150 aa, Chlamydophila caviae GPIC
MQLLSPAFDYGKPIPRKYTCQGVNISPPLIFKDIPAEAKSIALIVEDPDVPQNLRADGLWIHWLVYNLSPTITELVEGANIFAVQGLNTSGKACYEGPCPPDRQHRYFFYCYALDTILPSEENVTKDQLLEVMESHVIDNAELMGTYEKS

SEQ ID NO: 11459 - protein, 373 aa, Methanocaldococcus jannaschii DSM 2661
MMVRVMRYKKVPVKKIVNKIIDECDVILLVLDARDPEMTRNRELEKKIKAKGKKLIYVLNKADLVPKDILEKWKEVFGENTVFVSAKRRLGTKILREMIKQSLKEMGKKEGKVGIVGYPNVGKSSIINALTGKRKALTGSVAGLTKGEQWVRLTKNIKLMDTPGVLEMRDEDDLVISGALRLEKVENPIPPALKILSRINNFDNSIIKEYFGVDYEEVDEELLKKIGNKRSYLTKGGEVDLVRTAKTIIKEYQDGKLNYYKVDLKKYGQDRERDISFITKYLKDFPFIEDAKMIVTHLKDFDGLYKKIKKPVLGSEEIDGNIVVVSFGEKTKDACRKKVENLCRERNIEVLSKFGDKIGANNIYVAVGKRVKE

SEQ ID NO: 11460 - protein, 400 aa, Pyrococcus furiosus DSM 3638
MSIRLPQEGKVIEVVNGSLKIPNEPIVAYIEGDGIGREVIPAAIKVVDKAVETAYKGKRRIVWWKLLAGKEALQKVGKLLPEETVKGIAEVKVALKGPMETPIGTGHRSINVALRKMFDLYANIRPIKYYGVPTVYPYADKVDLIIFRENTEDVYAGIEWEAYSREAQKLREFLKNEFGIEIREDSGITLKPISKFATQRIVRKAIKWAIEKGRKRVTIMHKGNVMKFTEGAFRNWAFEVAEKEFSEYVSIGKPEEGKILVDDKIADNMLQQIILRPWEYDIIVTPNLNGDYLSDAAAALVGGVGMAAGINVGDYIAIAEPVHGTAPDIAGKGIANPSAAILSAALLLEYLGWVEAAELIRASLRKTIEKGKVTPDLARGEKALSTEEFIQEVIKEIEGE

SEQ ID NO: 11461 - protein, 423 aa, Lolium perenne
AVVCGRRYDVRIRVRSGGHDYEGLSYRSLQPENFAVVDLNQMRAVLVDGKARTAWVDSGAQLGELYYAISKYSRTLAFPAGVCPTIGVGGNLAGGGFGMLLRKYGIAAENVIDVKLVDANGKLHDKKSMGDDHFWAVRGGGGESFGIVVSWQVKLLPVPPTVTIFKIPKSVSEGAVDIINKWQLVAPQLPADLMIRIIAMGPKATFEAMYLGTCKTLTPMMQSKFPELGMNASHCNEMSWIESIPFVHLGHRDSLEGDLLNRNNTFKPFAEYKSDYVYEPFPKSVWEQIFGTWLVKPGAGIMIFDPYGATISATPEAATPFPHRKGVLFNIQYVNYWFAPGAGAAPLSWSKEIYNYMEPYVSKNPRQAYANYRDIDLGRNEVVNGVSTYSSGKVWGQKYFKGNFERLAITKGKVDPTDYFRNE

SEQ ID NO: 11462 - protein, 165 aa, Aegilops tauschii
VMASSATTVAPFQGLKSTAGLPVSRRSSGSLGSVSNGGRIRCMQVWPIEGIKKFETLSYLPPLSTEALLKQVDYLIRSKWVPCLEFSKVGIVFREHNSSPGYYDGRYWTMWKLPMFGCTDATQVLNEVEEVKKEYPDAYVRVIGFDNLRQVQCVSFIAFRPPGCE

SEQ ID NO: 11463 - protein, 218 aa, Triticum aestivum
  unsure (1)..(218): unsure at all Xaa locations
MEAETAAKRARENEGAAAADGAGEQAGISAVIPGWFSEISPMWXYQEMITHLPLCSIKDPKKVLVIGGGDGGVLREVSRHSSVEQIDICEIDKMVVDVSKQFFPHLALGFEDPRVSLHIGDGVAFLKNAPEGTYDAVIVDSSDPVGPAQELFEKPFFESVSRALRPGGVVCTQAESIWLHMHIIEDIVTKNQKPKSSRPQTPKEKKPRRRRRPSPPKP

SEQ ID NO: 11464 - protein, 165 aa, Triticum urartu
VMASSATTVAPFQGLKSTAGLPVSRRSSGSLGSVSNGGRIRCMQVWPIEGIKKFETLSYLPPLSTEALLKQVDYLIRSKWVPCLEFSKVGFVFREHYSSPGYYDGRYWTMWKLPMFGCTDATQVLNEVEEVKKEYPDAYVRVIGFDNLRQVQCVSFIAFRPPGCE

SEQ ID NO: 11465 - protein, 454 aa, Desulfitobacterium hafniense DCB-2
MNVFNLVIKNGKVVTADKIIEASLGINNGKIAAIIEAGTEIQAEKVIDAKGNYVFPGAIDTHAHLNDPGYLWREDYAHGTAAAGVGGFTTIIDMPLQNEPAMTDGQILDKKLEVVSPNAYVDFCFWGGLVDYNLNQLKELDEKGCVAFKSFIGPVSPDYVSLTIGQAKEAMEICKEFDGRAGFHCEDYSLIKWEEARAKRKDTNDWQDFLDSRPVIAELIATQNIIDLAKEVGAKVHICHVSHPRVAEIIRQAQNEGVDVTAETCGHYLTFTDQDVVKNGSLFKCAPPLRDAAAVERMWEYVNNGTLSAIASDHSPCELSEKSEEKHGVFGAWGGISGIQNVMQVVFSEGVVKRGYCPTLLARSLSEGPAKAFGIFGKKGAIQVGFDADLVILDPEKEWEITPESLYYVNPISAFVGLKGKGLPVCTLVRGEVVAQDGQLVGQKGHGEYVRKIK

SEQ ID NO: 11466 - protein, 165 aa, Triticum timopheevii subsp. armeniacum
VMASSATTVAPFQGLKSTAGLPVSRRSSGSLGSVSNGGRIRCMQVWPIEGIKKFETLSYLPPLSTEALLKQVDYLIRSKWVPCLEFSKVGFVFREHNSSPGYYDGRYWTMWKLPMFGCTDATQVLNEVEEVKKEYPDAYVRVIGFDNLRQVQCVSFIAFRPPGCE

SEQ ID NO: 11467 - protein, 165 aa, Triticum turgidum subsp. dicoccoides
VMASSATTVAPFQGLKSTAGLPVGRRSSGSLSSVSNGGRIRCMQVWPIEGIKKFETLSYLPPLSTEALLKQVDYLIRSKWVPCLEFSKVGFVFREHNSSPGYYDGRYWTMWKLPMFGCTDATQVLNEVEEVKKEYPDAYVRVIGFDNLRQVQCVSFIAYRPPGCE

SEQ ID NO: 11468 - protein, 333 aa, Zea mays
  unsure (1)..(333): unsure at all Xaa locations
MIRAVSSNASDNVYCTLLAHSALHGAMAGYTGFTVAPVNGRHAYIPFYRITLLDLKDPFPAAANSGAKASSASKWATKKKLVGGDAGYVLEDVPHLTDYMPQLPSPILLVCHVGFLTTYPNPLQDNPAYSVVKQYFVNPDDTVTQKIVVHKTSARGTHFRRAGPRQRVYFQSDEVNAAIVTCGGLCPGLNTVIRELVCGLYDMYGVSSVVGIEGGYKGFYSKNTXVALTPKSVNDIHKRGGTVLGTSRGGHDTAKIVDCLQDRGINQEVRRRGLKCSVVGVPKTIDNDIAVIDKSFGFDTAVEEAQRAINAAHVEAESAENGIGVVKLMGPHQ

SEQ ID NO: 11469 - protein, 165 aa, Triticum aestivum
VMASSATTVAPFQGLKSTAGLPVGRRSSGSLSSVSNGGRIRCMQVWPIEGIKKFETLSYLPPLSTEALLKQVDYLIRSKWVPCLEFSKVGFVFREHNSSPGYYDGRYWTMWKLPMFGCTDATQVLIEVEEVKKEYPDAYVRVIGFDNLRQVQCVSFIAFRPPGCE

SEQ ID NO: 11470 - protein, 428 aa, Zea mays
MGRGLGAAPVSPRLASLGAAALALLVAAALPSPAAGVNATAVLSAFPNFADFARLLASTPVASELAGRSSLTLLAVPNANLPQSPSAFVAGAAAGADIADVLRYHVLLEYLSPSDLARLPPSGKLVTTLFQTTGRAPSDFGAVNLTVGPNSTVVVRSPAPSPGSSATVLGAVTAVPYNLSVLAVGGLIVPSGFDLAASESRPPPPVNITRVLTDARGFYVAASMLQASGVASEFEADERGAGITVFVPTDDAFAGLPATDRLQSLPAERKAVVLRFHVLHSYYPLGSLESIVNPVQPTLATEHTEAGHFTLNITRVNGSIAIDTGIVQASITRTVFDQNPVAVFAVSKVLLPKEMFSRGDSGSTAMVPPSVAMAPGDAGTEQTPQTRLSSPPDLHGEDSESSAALATAKGTSWWCVGLMYLHLLLSLV

SEQ ID NO: 11471 - protein, 494 aa, Salmonella typhimurium LT2
MSDVTLLAEVTTFLRQRHGQFIAGERQAGNGTNFSVTNPATGKIIADVVSATPAQAEEAMQSARRAFDVWRKMPTLQRGALLLKLADTLAAHREELAQLESVCSGKTIMLSRGLELDQSVAFLRYFAGWAGKITGETLNVSLPSMGEERYTAFTQRQPIGVVVGIVPWNFSIMIAIWKLAAALVCGCTIVIKPSEYTPLTLLRVAELAKEAGFPDGVINVVNGAGGEIAQQLIAHPDCAKVSFTGSVATGEKVRRSATSSGKRVTLELGGKNAALFLNDLTAQAMVNGILEAGYLNQGQICAAAERFYLPQEKLDTVMTLLRQRLSEIVPGSPLDEKTVMGPLANQVQLEKVLRLIQRAREEGDTIVYGGETLPGEGYFLQPTAVKVRSKNSTLMHEETFGPVCSFIGYQNEKEALSHINDSPFGLAASVWSENISKALRYAEDIDAGMVWVNMHTFLDPAVPFGGMKGSGIGREFGSAFIDDYTELKSVMVRY

SEQ ID NO: 11472 - protein, 576 aa, Brassica napus
MAASFSVPSMIMEEEGRFEAEVAEVQTWWSSERFKLTRRPYTARDVVALRGHLKQGYASNEMAKKLWRTLKSHQVNGTASRTFGALDPVQVTMMAKHLDTIYVSGWQCSSTHTSTNEPGPDLADYPYDTVPNKVEHLFFAQQYHDRKQREARMSMSREERAKTPFVDYLKPIIADGGTGFGGTTATVKLCKLFVERGAAGVHIEDQSSVTKKCGHMAGKVLVAVSEHINRLVAARLQFDVMGTETVLVARTDAVAPTLIQSNIDSRDHQFILGVTNPNLRGKSLSSLLAEGMAVGNNGPALQAIEDQWLSSARLMTFSDAVVEALKRMNLSENEKSRRVTEWLIHARYENCLSNEQGRELAAKLGVTDLFWDWDLPRTREGFYRFQGSVTAAVVRGWAFAQIADLIWMETASPDLNECTQFAEGVKSKTPEVMLAYNLSPSFNWDASGMTDQQMMEFIPRIARLGYCWQFITLAGFHADALVVDTFAKDYARRGMLAYVERIQREERSNGVDTLAHQKWSGANYYDRYLKTVQGGISSTAAMGKGVTEEQFKETWTRPGAAGMGEGTSLVVAKSRM

SEQ ID NO: 11473 - protein, 366 aa, Streptomyces avermitilis MA-4680
MSDFVPGLEGVIAFETEIAEPDKEGGALRYRGVDIEDLVGHVSFGNVWGLLVDGAFNPGLPPAEPFPIPVHSGDIRVDVQSALAMLAPVWGLKPLLDIDAEQARHDLARAAVMALSYVAQSARGQGLPMVPQSEIDKAHSVVERFMIRWRGEPDPKHVAAVDAYWTSAAEHGMNASTFTARVIASTGADVAAALSGAVGAMSGPLHGGAPSRVLGMIEEIERTGDAEAYVKKALDKGERLMGFGHRVYRAEDPRARVLRRTARELGAPRFEIAEALEKAALEELHNRRPDRVLATNVEFWAAIMLDFAEVPAHMFTSMFTCARTAGWSAHILEQKRTGRLVRPSARYVGPGSRGPQEIEGYEDIAR

SEQ ID NO: 11474 - protein, 358 aa, Shigella flexneri 2a str. 301
MKALARFGKAFGGYKMIHVPQPICGPEDVVTEIKAAAICGADMKHYNVDSGSDEFNSIRGHEFAGCIAQVGEKVKDWKVGQRVVSDNSGHVCGVCPACEQGDFLCCTEKVNLGLDNNTWGGGFSKYCLVPGEILKIHRHALWEIPDGVDYEDAAVLDPICNAYKSIAQQSKFLPGQDVVVIGTGPLGLFSVQMARIMGAVNIVVVGLQEDVAVRFPVAKELGATAVVNGSTEDVVARCQQICGKDNLGLVIECSGANIALKQAIEMLRPNGEVVRVGMGFKPLDFSINDITAWNKSIIGHMAYDSTSWRNAIRLLASGAIKVKPMITHRIGLSQWREGFDAMVDKTAIKVIMTYDFDE

SEQ ID NO: 11475 - protein, 341 aa, Shewanella oneidensis MR-1
MKALSKLKAEKGIWLVDAPKPEMGHNDLLIKIKKTAICGTDMHIYNWDEWSQKTIPVPMVVGHEYVGEVVDIGQEVRGFNIGDRVSGEGHITCGHCRNCRAGRTHLCRNTSGVGVNREGSFAEYLVIPAFNAFKIPDDISDDLASIFDPFGNAVHTALSFDLVGEDVLITGAGPIGIMAAAVCRHVGARHVVITDVNEYRLELARKMGATRAVNVAQENLKDVMKELGMTEGFDVGLEMSGVPSAFRAMLDTMNHGGKIAMLGIPGGEMAIDWSKVIFKGLVIKGIYGREMFETWYKMASLIQSGLDISPIITHHYKIDDFQKGFDAMGSGQSGKVILSWD

SEQ ID NO: 11476 - protein, 296 aa, Saccharomyces cerevisiae
MITTPLVHVASVEKGRSYEDFQKVYNAIALKLREDDEYDNYIGYGPVLVLLAWHISGTWDKHDNTGGSYGGTYRFKKEFNDPSNAGLQNGFKFLEPIHKEFPWISSGDLFSLGGVTAVQEMQGPKIPWRCGRVDTPEDTTPDNGRLPDADKDAGYVRTFFQRLNMNDREVVALMGAHALGKTHLKNSGYEGPWGAANNVFTNEFYLNLLNEDWKLEKNDANNEQWDSKSGYMMLPTDYSLIQDPKYLSIVKEYANDQDKFFKDFSKAFEKLLENGITFPKDAPSPFIFKTLEEQGL

SEQ ID NO: 11477 - protein, 364 aa, Neurospora crassa
MSTEAKKTMKAVVFEGPKKVSVQERPIPEVQDPRDIIVKVQMTALCGSELHTYRGREASTPGFIMGHEFTGVAHAVGSSVKTIKVGDKVVAPFTVSCGTCFYCLHGFSSRCASSLLFGSPGLDGGQAEYVRIPLADGTAVVAPPEIEDERALVLMADIFPTGYFGAKNAFKLMHDLNPEEATVVVVGCGPVGLCAVVSALEYKPKHLFAVDCVESRLALAKELGAEPLNFAEVEKGGVGLEGMVKRIKEVTEGRGADAVVEVVGSRPALKTAYELLRPFGVISSIGVQGHYDLPWSGEDGYNKNLRVQMGRCPVRSIFPEALEVMGRNQHKFGFMYDKIMPLAEAVEGYDLFDNMKVQKVIFTP

SEQ ID NO: 11478 - protein, 347 aa, Chloroflexus aurantiacus
MRAARLHEYDEHLNVQLQLEDVPLPKITKPGDVIVRIGAAGLCRTDLHIIEGVWKDIQDPQRTLLPYILGHENAGWVEEVGPGVTSVKVGDPVICHPLRSCGVCLGCRRGEDMYCEHGSFPGLNCDGGFAEYMLTNERALIKLNPNVAPVDVAPLADAGITAYRVAKKAARKLNPGQYCVILGVGGLGHIALQSVRELCGARIIAIDRSEAARQLARNLGAHYVLDGSDTIVQEVKELTHGGAHVVIDFVGELGAEQVSWQMLRQGGTHFVVGYGGAVHVPTVHMIITEIAIEGSLVGNYVELVELMELNAEGRVKLHGQQYRLDQINQAIDDFKNRRIAGRAVIVP

SEQ ID NO: 11479 - protein, 218 aa, Oryza sativa
MEVEEAAYRTVWSEPPKRPAGRTKFRETRHPVYRGVRRRGGRPGAAGRWVCEVRVPGARGSRLWLGTFATAEAAARGHDAAALALRGRAACLNFADFAWRMPPVPASAALAGARGVRDPVAVAVEAFQRQSAAPSSPAETFANDGDEEEANKEVLPVAAAEVFDAGAFELDDGFRFGGMDAGSYYASLAQGLLVEPPAAGAWWEDGELADSDMPLWSY

SEQ ID NO: 11480 - protein, 150 aa, Triticum aestivum
  unsure (1)..(150): unsure at all Xaa locations
MAPTVMASSATSVAPFQGLKSTAGLPVSRRSNGASLGSVSNGGRIRCMQVWPIEGIKKFETLSYLPPLXSTEALLKQVDYLIRSKXGXPCLEVXQRVGFIFREHNASPGVLXDGRYWXIWELPMFXVPTQGDSGGKRKKRSPGRSSAINP

SEQ ID NO: 11481 - protein, 353 aa, Rhodobacter sphaeroides 2.4.1
MVRPRLNWAAEPWSDSEELECAMVIPETETCATFAFRAPSGAWFDYQPGQFLTLDLPVPGGRVQRTYTISSSPSRPLSLSVTVKAQPGSIGGRWMLDKLKPGMRIKAYGPAGQFTSLRHRSPKYLFISAGSGITPMMSMTTWAWDSGEMPDIVFVHAARSPAEIIFRRRLEQFARRVPGLQLRFTVKEEDPFSVWTGYRGRLSQIMLGLMAPDYLEREVFCCGPEPFMQAVREMLVSLGYDMDRYHEESFAAPALEELPVDIPEPAAVSELCFAASGVRVACDGTETVLAVARRAGLNIPSGCNFGLCGTCKVQKIEGEVAMVHNGGISDEEIAAGTILACCARPQGRVTLDL

SEQ ID NO: 11482 - protein, 467 aa, Methanococcoides burtonii DSM 6242
MTSRLNRSLFVFRRDMRVDDNSALLAALDMSDVVIPCFILDPRLCDPKGKAFNSNALQFLLESLYDLKGQLEKVNGRLYLFSGLPEGVIGQLLENLEIDAVFVNHDYTPFSIKRDMQIASICTDKGVDMLQFHDCLLHEPGSIRTKKGTPYKVFTQFFREASKRDVAVPSMFSGGSFFTGDCGVDEVDEGSFLKRSLPERNEQIFVHGGRANGLSVLQSLSQFVNYDTERDLPSVKGTTGLSAHNKLGTISIREFYYSVIDELGRGHTLINELYWRDFFTQISFEFPDVFKHAFKKKFDHLSWDNDRIFFDAWCLGKTGFPIVDAGMRELNTTGYMHNRVRMIVASFLVKDLHIDWKRGERYFASKLVDYDPCVNNGNWQWAASTGADSQPYFRIFNPWLQQKKFDKDCKYIKKWIPELEDIEPQRIHKLEKGDMDIPGYPAPIVDHSKEREVALFMFKAASQIMDV

SEQ ID NO: 11483 - protein, 122 aa, Rickettsia rickettsii
MIQMQSILEVADNSGAKKVMCIKVLGGSHHMVAKLGDVIVVSVKDAIPGGKVKKGDVYKGLIVRTKTGVVRPDGSTIKFDQNALVLLNKQDEPIGTRVFGPVTRELRAKKYVRIMSLAEEVL

SEQ ID NO: 11484 - protein, 483 aa, Prunus avium
MLAQKQAEEAIVSNFSEAHDHEGKEDHHQDKEEENTSLFNVKNFLWHGGSVWDAWFSCASNQVAQVLLTLPYSFSQLGLLSGILLQIFYGIVGSWTAYLISVLYIEYRSRKEKENVNFKNHVIQWFEVLDGLLGPYWKAVGLAFNCTFLLFGSVIQLIACASNIYYINDNLDKRTWTYIFGACCATTVFIPSFHNYRIWSFLGLGMTTYTAWYLTIAAVVHGQKEGVTHTAPTKLVLYFTGATNILYTFGGHAVTVEIMHAMWKPQKFKYIYLFATVYVFTLTIPSATSVYWAFGDELLNHANAFSLLPKNAWRDAAVILMLIHQFITFGFACTPLYFVWEKVIGMHDTKSICLRALARLPVVIPIWFLAIIFPFFGPINSAVGALLVSFTVYIIPSLAHMLTYRKASARQNAAEKPPFFLPSWTAMYVINSFIVVWVLVIGFGFGGWASMTNFVRQVDNFGLFAKCYQCNSPKLPAAAAPHH

SEQ ID NO: 11485 - protein, 260 aa, Triticum aestivum
SARGADIWSCGVILFVLLAGYLPFHDKNLMDMYKKIGKAEFKCPCWFSTDARRLLLRILDPNPSTRISMEKIMENPWFRKGLDAKLLRYNLQSKNAPQVDKNADSDSLSINITAESKQQEEKKPTNMNAFDIISLSTGLDLSGLFEESDNKREYKFTSTNTSSTIVSKIEDVAKNLRLKLTKKDGGLLKMEASKPGRKGVMGIDAEIFEVSPNFHLVEIKKTNGDTLEYQKVLNREMRPALKDIVWAWQGEQSKQQQTMI

SEQ ID NO: 11486 - protein, 165 aa, Triticum aestivum
VMASSATTVAPFQGLKSTAGLPVSRRSSASLGSVSNGGRIRCMQVWPIEGIKKFETLSYLPPLSTEALLKQVDYLIRSKWVPCLEFSKVGFVFREHNSSPGYYDGRYWTMWKLPMFGCTDATQVLNEVEEVKKEYPDAYVRVIGFDNLRQVQCVSFIAFRPPGCE

SEQ ID NO: 11487 - protein, 273 aa, Oryza sativa (japonica cultivar-group)
MAAAVRSVWADNFAAESAILRAVAPCAVYAAINVQYPGCVVSAAGGAGDHRCYYDLTAEERYQVVRANADELKPLQLGLAVRTADGGRFAWEFNLNEFDLAADGDMCEPGSVDYLRHRGMDFNALPWSGVGAASLGRLLWSSGLLAARPSWATFAGAYHVAYFARILMLAVAVAGTGGGGAARRLPADVGGFEEMVRSLLGHHVYDVRLLAGELRGPLADVARQLGAAVPADAAAAGLAGAGALMALQAFEALREQCRGVMPHRGLLCGIQAS

SEQ ID NO: 11488 - protein, 391 aa, Thermosynechococcus elongatus BP-1
MNLLEQLRQMTVVVADTGDILAIQKFTPRDATTNPSLITAAAQMKEYQSIVDETLRQAKADLGSGATSREIVSLAVDRLAVAFGLKILQIIPGRVSTEVDARLSYDTAATVQKARELISQYEAAGVGRDRVLIKIAATWEGIRAAEILEKEGIHCNLTLLFGFHQAVACAEAGVTLISPFVGRILDWYKKKTGRAEYPGPEDPGVISVTKIYNYYKKFGYPTEVMGASFRNIGEIIELAGCDLLTISPALLQELQNTTGELKRKLDPAIAATLDIEKVAMDEATFRKMHAADEMASEKLEEGIKGFTKALETLEDLLRRHLARIEGEATLTHAAEELFHVYDLDGDGIITREEWLGTDAVFDALDANHDGKVTPEDMGAGLGVVLHLAQAK

SEQ ID NO: 11489 - protein, 165 aa, Secale cereale
VMASSATSVAPFQGLKSTAGLPVSRRSSGSLGSVSNGGRIRCMQVWPIEGIKKFETLSYLPPLSTEALLKQVDYLIRSKWVPCLEFSKVGFVFREHNSSPGYYDGRYWTMWKLPMFGCTDATQVLNEVEEVKKEYPDAYVRVIGFDNLRQVQCVSFIAFRPPGCV

SEQ ID NO: 11490 - protein, 400 aa, Exiguobacterium sp. 255-15
MNQTEKIITQTEKFGAHNYHPLPIVISEAEGVFVKDPEGREYMDMLSAYSAVNQGHRHPKIIEALKRQADKITLTSRAFHNDQLGFFYEKVAQLTGKDMVLPMNTGAEAVETAVKAARRWAYEVKQIPGDAEIIVCEGNFHGRTMTAVSMSTEAEYQRGFGPLLPGIKTIPYGDLEALKGAITENTAAFIVEPIQGEAGILIPYEGFLKDAQDVCKEQNVLLVSDEIQSGLGRSGKWFASDWDNVTPDMYILGKALGGGVFPISCVAANHDILSVFNPGSHGSTFGGNPLACAVSVASLEVLEEEKLPERSLELGTYFMNRLKEIDNPMIKEVRGRGLFIGVELTEAARPYCEALKEKGLLCKETHETVIRFAPPLVITKEELDWAFERIEQVLGVSVAQ

SEQ ID NO: 11491 - protein, 164 aa, Bromus catharticus
VMASSATSVAPFQGLKSTAGLPVSRRSTGLGSVSSGGRIRCMQVWPIEGIKKFETLSYLPPLSTEALLKQIDYLIRSKWVPCLEFSKVGFVFREHNASPGYYDGRYWTMWKLPMFGCTDASQVIKELEEVKKEYPDAYVRIIGFDNLRQVQCVSFIAFKPPGCE

SEQ ID NO: 11492 - protein, 165 aa, Brassica napus
MAQDDQSAARSTGTVNWFSDAKGYGFIAPDDGGDELFVHQSSIVSDGFRTLTVDEPVEYAIAVGNDGKTKAVDVTAPGGGSLNKKEMSSRGNGGSCFSCGEVGHMAKDCAGGKRYGGGGRRSGGEGSCYVCGNVGHFARDCRQNAGGNSGGGGGGECYNCGVVGH

SEQ ID NO: 11493 - protein, 225 aa, Commelina communis
MGRGKIEIKKIENPTNRQVTYSKRRAGIMKKAKELTVLCDAQVSIIMFSSTKKFSEFCSPGTNTKQIFDRYQQACQVDLWSAQYERMQNHLKNLKEINDGLRREIRQRMGEDLDGMDIEELRGLEQNLHDSLKTVRERKYHVLQTQTETYKKKVKHSSEAYNNFVRALQMKEDDPVYGYVDDEASHFEGALALANGSSHMYAFRLQPNQPNLHGMEYAPHDLRLA

SEQ ID NO: 11494 - protein, 199 aa, Oceanobacillus iheyensis HTE831
MNKSTNIVWQKTSVKKADRQHLNNHKSAVLWFTGLSGSGKSTLSSALEKELFSLETHTYHLDGDNVRHGLNKNLGFSPEDREENIRRIGEVSKLMVDAGLITLTAFISPYQEDRDHVRATLAQDEFIEIYVKCSLDMCEARDPKGLYKKARLGEINNFTGIDAPYEEPLHPEIVIDTENQSIEESVQTIIHYLKDKQYI

SEQ ID NO: 11495 - protein, 123 aa, Oryza sativa (japonica cultivar-group)
MIQPQTLLNVADNSGARKLMCIRVIGAASNQRYARIGDVIVAVIKDAVPQMPLERSEVIRAVIVRTCKEFKCEDGIIIRYDDNAAVIIDQKGNPKGTRVFGAIAEELRELNFTKIVSLAPEVL

SEQ ID NO: 11496 - protein, 159 aa, Prochlorococcus marinus subsp. marinus str. CCMP1375
MLINVKETVVETADGEKKNLGDYLGNVLLIVNVASLCGNTPQYKGLEKLFEKYKKNGFCVLAFPCNDFAGQEPGTIEEIKEFCSVKYGTTFEIFNKVHAKGLTTEPYTTLNKVEPKGDVSWNFEKFLVGKDGNVIARFEPSVEPSSEELITAIEVALSS

SEQ ID NO: 11497 - protein, 471 aa, Streptomyces coelicolor A3(2)
MATAPSVSYSMTVRLEVPAGGTAVSQLTTAVESAGGSVTGLDVTASGHDKLRIDVTIAAGSTAHADEIVEQLRGIEGVSLGKVSDRTFLMHLGGKIEMQSKHPIRNRDDLSMVYTPGVARVCMAIAENPEDARRLTIKRNSVAVVTDGSAVLGLGNIGPKAALPVMEGKAALFKRFAGIDAWPICLDTQDTDAIVEIVKAIAPGFAGINLEDISAPRCFEIEARLREALDIPVFHDDQHGTAIVVLAALTNALRVVGKGIENVRVVMSGAGAAGTAILKLLLAAGVKNAVVADIHGVVHTGRADLVDAAPESALRWIADNTNPEGLTGTLKEAVHGADVFIGVSAPNVLDGEDVAAMADGAIVFALANPDPEVDPAIARETAAVVATGRSDFPNQINNVLVFPGVFRGLLDAQSRTVNTEMMLAAAHALANVVTEDEINPNYIIPSVFNDKVAGAVAGAVRDAAKAAGVVA

SEQ ID NO: 11498 - protein, 166 aa, Schizosaccharomyces pombe
MSDQDALDTQEKELLEMKERVAEMEAEAAKLRAMQEQLDNETEALRNDKESIDAQSVYVGNVDYSVTPEELQSHFASCGSVNRVTILCDKFTGHPKGFAYIEFSEPSLVPNALLLNGSMLHERPLKVTPKRTNVPGMSRGRGRGRGRGRGRGRGGYRGRARGFAPY

SEQ ID NO: 11499 - protein, 160 aa, Solanum tuberosum
MSDEEHHFESKADAGASKTYPQQAGTIRKNGYIVIKGRPCKVVEVSTSKTGKHGHAKCHFVAIDIFNGKKLEDIVPSSHNCDVPHVNRTDYQLIDISEDGFVSLLTESGNTKDDLRLPTDESLLKQVKDGFQEGKDLVVSVMSAMGEEQINAIKDIGTKN

SEQ ID NO: 11500 - protein, 1413 aa, ASPERGILLUS NIDULANS FGSC A4
MADLKPPFTEEAARAKVKIAQNLWNAQDPVRVSQAYTPGCIWRNRTSFFSGTEAIVDFLTAKWKRERNYRLRKELFSFTDNRIAVQFWYEFQDANDSMRWKRCYGLEDWTFDRESGKMCKRMMSGNDILLGPDGNGEGRCDYRLLTQRWDHPTYHPYNRNRRLQQLDLNHFCRARISLAMEETSPFPDSKTMRSPLTDASNRINNCHTPTTERRLMREEHALTSPVPMSIVDSPLSPRNNAENNGPPPVGDSRACSKRNSAVSAASIVSAKGKRKTHVGPWQLGRTLGSGATGRVRLAKHAVTGQTAAVKIVSKKCAAISQSDSIAAMDRNAGTFIGAGGRQMPSGIEREVVIMKLIEHPNVISLYDVWENRGELYLVLEYVEGGELFDYVSNHGPLPEEEAVRLFRQIIAGLGYCHRFNICHRDLKPENILLDGEHNIKLADFGMAALQPAGHWLNTSCGSPHYAAPEIIYGRKYRGDKADLWSCGIILFALLTGFLPFDGEDLHATLQLVRKGDYMIPPHVSAEAADLIQRILQKKPDDRISMKDIWKHPLLKKYEKFHQAICNHYLGPPPPLSPQDCGPPVVRQDIDVDLLRNLQTLWHDVKPERLIEKLISLEPTQERLFYHALVKFRNEQLENYEGQPLRYSTSDYHHISRGQARLSKHLRSRSQNGSQRRSRAPSVKETGKRRPSTRELKPSASVETYDPYRSPFNRVPDKSPQYAHVTIHREAPETSPKPAEVEVDSSNPFLDDEQEIECQQSPPFTLVRKRKQNFNSVKSFQSKTSLISSRRALNSASTPRSVSYKRNVTFHHNRNRSQSSASAKAKRAHCNRQPSEASLISGFDDDPFSDSRSSSLLPAQPAVVRGAGIAVKNSVQRRVQHSDFVWRDEARKVSHELSQICEEAFNGSSLSTGCTDTTCVSPETPATSVSLASPGVSNHQMDSSSSTVCLAATPPADSPKTSHVRRELEETRRRLIEHSMKDGSKEIPQCLAPVIDHLDRLIEQEKTRRPGKVSTKEDYSSMSDLFCGSPVEPTQLSVLSEELNTGRRSDDTPSSKKDRQVSGSTAASSQISRGKRSIRMVPHSSYQSISNTEPRAVHRPAAALIDRPENDRGNALASRVGSNHRHNRTPCELDPIDEHPASPRRSAVRSTDHKKWSWFRKSQNIEEDFVKAPTVVKPLHPSSATVIVHEVHPARNTAENQPKLGKPPSDSQKVSFWSFIKRKKGKNADPESTATNPVLESRRDDERQRAHPGPKLSENKTATKPRRSIRSSGISNNWFARVFQFKPATRVVALNASKIKGRKEIYKMLRDWKQYGMEDIYLDKPNSIIYGRVGESNFLHLRPVDFSADFYTVIEDGRQANLSVVRFRQERGAASSFNRVVDTLCMVMKQRGLLVEDPARAKRMAQVLDAFPNA

SEQ ID NO: 11501 - protein, 304 aa, Zea mays
  unsure (1)..(304): unsure at all Xaa locations
MAGMSLQHPWAFAFGLLGNVISFMTFLAPIPTFYRIYKSKSTEGFQSVPYVVALFSAMLWIFYALIKSNETFLITINAAGCVIETIYVVMYFVYAPKKAKLFTAKIMVLLNGGVFXVILLLTLLLFKGSKRVVLLGWICVGFXPVSVFVAPLSIMRRVIQTKSVEYMXPFSLSLSFTLSAVVWFLYGLLIKDKYVALPNILGFTFGVVQMVLYVLYMNKTPVAATAEGKDAGKLSSAADEHVLVNIAKLSPALPERSSGVHPVTQMAGVPVRSCAAEATAPAMLPNRDVVDVFVTRHSPAVHVA

SEQ ID NO: 11502 - protein, 204 aa, Yarrowia lipolytica
MPQPTDLRRKLVIVGDGACGKTCLLIVFAKGTFPEVYVPTVFENYVADVEIDGRRVELALWDTAGQEDYDRLRPLSYPDANVIIICFAIDSPDSLDNVQEKWISEVLHFCQGVPILLVGCKVDLRNDPKTIEELRRTSQRPVTTEEGNAVAQKIGAGKYLECSARTHDGVREVFEHATRAALTAHGQKGSKSSSREGKKKCLIL

SEQ ID NO: 11503 - protein, 222 aa, Triticum aestivum
  unsure (1)..(222): unsure at all Xaa locations
GGIPFNKAYGMTAFEYHGTDSRFNRVFNEGMKNHSVIITKKLLDFYTGFEGVSTLVDVGGGVGATLHAITSRHPHISGVNFDLPHVISEAPAXFPGVRHVGPGTCSPPVPAGDAILMKWILHDWSDAHCATLLKNCYDALPENGKVIVVECVLPVNTEATPKAQGVFHVDMIMLAHNPGGKERYEREFRELAKGAGFSGFKATYIYANAWAIDSSSEPPSPR

SEQ ID NO: 11504 - protein, 347 aa, Bacillus subtilis subsp. subtilis str. 168
MQSGKMKALMKKDGAFGAVLTEVPIPEIDKHEVLIKVKAASICGTDVHIYNWDQWARQRIKTPYVFGHEFSGIVEGVGENVSSVKVGEYVSAETHIVCGECVPCLTGKSHVCTNTAIIGVDTAGCFAEYVKVPADNIWRNPADMDPSIASIQEPLGNAVHTVLESQPAGGTTAVIGCGPIGLMAVAVAKAAGASQVIAIDKNEYRLRLAKQMGATCTVSIEKEDPLKIVSALTSGEGADLVCEMSGHPSAIAQGLAMAANGGRFHILSLPEHPVTIDLTNKVVFKGLTIQGITGRKMFSTWRQVSQLISSNMIDLAPVITHQFPLEEFEKGFELMRSGQCGKVILIP

SEQ ID NO: 11505 - protein, 407 aa, Aethionema grandiflora
YQGVYPVKGNQDRFVVEDIVKFGSPFRFGLEAGSKPEILLAMSCLCKGNPDAFLVCNGFKDAEYISLALLGRKLALNTVIVLEQEEELDLVIDLSQKMNVRPVIGLRAKLRTKHSGHFGSTSGEKGKFGLTTTQIVRVVRKLRQAGMLDCLQLLHFHIGSQIPSTALLSDGVAEAAQLYCELVRLGAHMKVIDIGGGLGIDYDGSKSGESDLSVAYTLEEYADAVVASVRFVCDRKSVKHPVICSESGRAIVSHHSVLIFEAVSAAKPMAHHANPEDIQFLLEGNEEARADYEDLYAAVMRGDHESCLLYVDQLKQRCVEGFKEGVLSIEQLASVDGLCEWVLKAIGASDPVRTYHVNLSVFTSIPDFWGIEQLFPIVPIHKLDQRPGVRGILSDLTCDSDGKINKF

SEQ ID NO: 11506 - protein, 230 aa, Gloeobacter violaceus PCC 7421
MDLDILKQTAARRAVELVEDGMVVGLGTGSTAAFAVSVLAERVRLGLRVVGIPTSERTARQAEAEGIVLGTLAEQSRVDLTIDGADEVALGELALIKGLGGALLREKIVAAASERLIIIVDATKLVEQLGSHGPLPVEVAPFGWQATARALERLGAEVNLRAQHGQAFLTDGGHYILDCRFGPIARPAELEAAIDRIPGVVESGLFVGMASAVIVADEGGIEVLTPSAAP

SEQ ID NO: 11507 - protein, 406 aa, Theobroma cacao
YQGVYPVKSNQDRFVVEDIVKFGSSFRFGLEAGSKPELLLAMSCLCKGNPEALLVCNGFKDAEYISLALLARKLALKHVIVLEQEEEVDMVIDISQKLSVRPVIGVRAKLRTKHSGHFGSTSGEKGKFGLTTTQVLRVVKKLQDSGMLDCLQLLHFHIGSQIPSTALLSDGVGEAAQIYSELVRLGARMKVVDFGGGLGIDYNGSKSGDSDLSVPYGLQEYAHVVNAIRFVCDRKSVKHPVICSESGRAIVSHHSILIFEAICLTAPATHNEPINIPFIMEGLSEDACADYWNLRDTAMRTGDGAFWFYADQWKQRCVEQFKEGTLGIEQLASVDGLCEWVLKAIGASDPVHTYNINLSVFTSIPDLWGIDQLFPIVPIHKLDQRPGARGILSDLTCDSDGKINKF

SEQ ID NO: 11508 - protein, 299 aa, Triticum aestivum
  unsure (1)..(299): unsure at all Xaa locations
MKTLLILTILAMATTIATANMQVDPSSRVQWPQEQPPPQXQQPFSQQPQQIFPQPQQTFPHQPQQAFPQPQQTFPRRPQQQFPQPQQPQQPFPQPQQPQLPFPQQPQQPFPQXPQQPQQPFPQXSQQPQQPFPQPQQQFPQPQQPQQSFPQQQQWMIQSFLQQQMNPCKNFLLQQCNPVSLVSSLVSIILPRSDCQLMQQQCCQQLAQIPQQLQCAAIHSVVHSIIMQQEQRQGVQIRRPLFQLVQGQGIIQPQQPAQLEVIRSLVLRTLPTMCNVYVSPDCSTINAPFASIVVGIGGQ

SEQ ID NO: 11509 - protein, 408 aa, Carica papaya
YQGVYPVKSNQDRFVVEDIVKFGSSFRFGLEAGSKPELLLAMSCLCKGSPDAFLVCNGFKDAEYISLALFARKLALNTVIVLEQEEEIDLVIDLSQKLSVKPVIGVRAKLRTKHSGHFGSTSGEKGKFGLTTTQILRVVGKLKQAGMLDCLQLLHFHIGSQIPSTALLSDGVGEAAQIYCELTRLGARMQVVDIGGGLGIDYDGSKSGESDLSVAYSLEEYAAAVVRTVAFVCDRKSVKHPVICSESGRAIVSHHSVLIFEAMSVTGPARRNEYPTDLQFFFDGFKDDARAAYLNLAIADARGDYDTCWFYADQLKERCVEDFKEGTLCIEQLAAVDGLCDFVSKVIGASEPVRTYHVNLSIFTSIPDFWSIGQIFPIVPIHRLDERPEVRGTLSDLTCDSDGKIDKF

SEQ ID NO: 11510 - protein, 427 aa, Pirellula sp. 1
MMNSVWRPYCQMKTAPPPMKIVATEGCHLIGQNGECWIDGMASWWSACHGYNHPQVRDAVTEQLHRMPHVMFGGITHEPAERLANRLAELAPDDLNHVFFSDSGSVAVEVAMKMAIGHWRRHDRPGRTRFLAFDNAYHGDTTGAMSLCDPQRSMHARYSGAITQQYHVALPRDATTEAVLERTLAAHSDSIAGVFVEPLVQGAGGMRFHDVITLRRIRDACKRHDVLLIADEIATGFQRTGKMFAVDHTADLQSPVVPDILCLGKALTAGTMSMAVTIARSHVFDSFYSDDPGAALMHGPTFMANPLACSAANASLDLFEGNPYDVEKIETILRERLSVLRDIDNVADVRCFGAIGVVQFRDPPKMQMVQDELVRRGVWLRPFGDCLYTTPPLCINEDALHRICDAMIEATRATMPRSDSPMCNQLR

SEQ ID NO: 11511 - protein, 104 aa, Zea mays
MHGRTAMAVACLLCMTALLLVQDVQSRRLLWTEQEKKQTHGGLVGNHGAADRRSTSLQEPCSGATGGGGTGSADKQGELPCDDDTSKWTELHTDYIYTQDFKHP

SEQ ID NO: 11512 - protein, 245 aa, Zea mays
  unsure (1)..(245): unsure at all Xaa locations
MAKNYPTVSAEYSEAVEKARRKLRALIXPLMLRLAWHSAGTFDVSSRTGGPFGTMKHLFYLAHGANAGLDIAVRLLEPIKEEFPILSYADFYQLAGVVAVEVTGGPEIPFHPGREDKPQPPPEGRLPDATKGSDHLRQVFGKQMGLSDQDIVALSGGHTLGRCHKERSGFEGAWTTNPLVFDNSYFKELLSGDKEGLLQLPSDKALLSDPVFRPLVEKYAVDEKAFFDDYKEAHLKLSELGFADA

SEQ ID NO: 11513 - protein, 566 aa, Triticum aestivum
  unsure (1)..(566): unsure at all Xaa locations
MAAAAVASNGGAAPVPGRLASVYSEVQTSRIAHALPLPSVLRSHFTLADGPASTAAGSPDEIAKLFPCLYGQPSAAVVPSAEPVETKPLKIGVVLSGGQAPGGHNVICGIFDYLQERAKGSTMYGFKGGPAGVMKGKYVELTTDFVYPYRNQGGFDMICSGRDKIETPEQFQQAEDTVNRLDLDGLVVIGGDDSNTNACLLGEYFRGRNLKTRVIGCPKTIDGDLKCKEVPTSFGFDTACKIYSEMIGNVMTDARSTGKYYHFVRLMGRAASHITLECALQTHPNVALIGEEVAEKREGVGVGAASLAMAHRARSVSRRREXFGGWGVRDDGGVVDGDEGVXRCIGEXGSVLEGIFGEGEGGWLEASRVLGGTARXFDFLPKTIQEQLLLERDPHGNVQVAKIETEKMLIAMVETELEKRRAAGKYSAHFRGQSHFFGYEGRCGLPTNFDSSYCYALGYGAGALLQFGKTGLISSVGNLAAPVEEWTVGGTALTALMDVERRHGKNKPVIKKAMVELDAAPFKKFASLRDEWASKNRYISPGPIQFSGPGSDASNHTLMLELGAEI

SEQ ID NO: 11514 - protein, 182 aa, Spirodela punctata
MGNCFSQSTQTRGSKRNQKPDPLDEPSTRQAQNGGSANAPPQKPPGAVTGVLRQPPAKGSAAVGPVLGRRMEDVRQTYAIGKELGRGQFGVTHLCTDRVTGKQFACKTIAKRKLVNKEDIEDVRREVQIMHHLTGQQNIVELVGAYEDKQSVHLVMELCAGGELFDRIIAKGHYTERAAASL

SEQ ID NO: 11515 - protein, 190 aa, Arabidopsis lyrata subsp. petraea
HFLSFLLIPIMAIVAVELLRMGPEEILNVWNSLQFDLVQVLCSSFFVIFISTVYFMSKPRTIYLVDYSCYKPPVTCRVPFATFMEHSRLNLKDNPKSVEFQMRILERSGLGEETCLPPAIHYIPPTPTMDAARSEAQMVIFTAMDDLFKKTGLKPKDVDILIVNCSLFSPTPSLSAMVINKYKLRSNIKS

SEQ ID NO: 11516 - protein, 81 aa, Zea mays
MTEGTARGGDILIAIILPPLGVFLKFGCKVEFWLCLLLTFLVYLPGIIYAIYVITKDYPASADIPRQGERASRSHSVRNGD

SEQ ID NO: 11517 - protein, 480 aa, Lactobacillus johnsonii NCC 533
MTISNKVMLITYPDSLGKNIKDLDDVLHTDLKGAVGGVHLLPFFPSTGDRGFAPTDYSMVDPQFGDWSDVEKLGEDYYLMFDFMINHISRQSKYYKDFQKNKDQSPYADLFLSWDKFWPKNRPTQKDIDLIYKRKDRAPYQEITFADGSKEKLWNTFGEEQIDLDVRKDVTKQFIKQTLNNLIDHGSDIIRLDAFAYAIKKLDTNDFFVEPEIWDLLKEVQDDISAKGALILPEIHEHYSMPFKIARHGYFIYDFALPMVVLYSLYSGKSQRLASWLKKSPMKQFTTLDTHDGIGVVDARDILTPNEIGYTSNELYKVGANVKKKYSSAEYHNLDIYQINSTFYSALGDDDKKYFMARLLQVFAPGIPQVYYVGMLAGKNDIELLEKTKEGRNINRHYYSREEIHEEVQRPVVSSLINLLRFRNNEAAFDLNGSIEVTTPTENEIHIIRLNQDKTRKAELRANLETLAYKVLVNGREMAF

SEQ ID NO: 11518 - protein, 484 aa, Chloroflexus aurantiacus
MDYPFFHVSHYIDGQFVDGGSRFDILYPATNQVIGSAPEAGADEVDAAVAAASRAFRQWSRMPAAERRLILKRFAQLIRDHEAELAAIETWDVGRPITENRSGYIPRIAANIEFFADFAVTHGSESYPMDNGYINYVLRQPVGVAALIAPWNIPLLQATWKMGPALAFGNTVVLKPAELTPIGTWRLAQLAHAAGVPAGVINVIHGFGPNSAGALLTRHPDVKLISFTGETTTGKIIMATAAPTLKRVSFELGGKGANIIFADADLDRAVAISLRSSFFNQGEFCLAGPRLLVQRPIYEAFLTRFQRATSQLQVGDPFDPQTRVGALISREHYERVTGFIDLARADGAHILTGGTDPVLPEPFAQGNFLQPTIITDVKPHDQVCQDEIFGPVVTVVPFDDEEEAIAIANGVSYGLSAVVQTRDVGRAVRMGSALEAGTIWINDFFVRDLRVPFGGMKQSGIGREGGHYSLEFYTEAKTICLSNQ

SEQ ID NO: 11519 - protein, 143 aa, Zea mays
MAMAYKMATEGMNVKEECQRWFMEMKWKKVHRFVVYKIDERSRAVLVDKVGGPGEGYEELVAALPGDDCRYAVFDFDFVTVDNCQKSKIFFIAWSPAASRIRAKILYATSKQGLRRLLDGVHYEVQATDPSEMGFDVIRGRAQ

SEQ ID NO: 11520 - protein, 259 aa, Zea mays
GSERSWSERRACVAMDGAEDDGTEWMMHGAGGKGKGGGALDKNKKRFSDEQTKSLESMFATQAKLEPRQKLQLARELGLQPRQVAIWFQNKRARWKSKQLEREYSALRDDYHALLCSYESLKDEKRALLKQLEKLAEMLHEPPQAGKYYGGNADDVRSGGVGGTKEEEESTDACAGAALYSSEGAGGGRFIAHFLADDDVGAALFRPPSSPQPTAGLLTSSGPPEHQAPFQFHSDCWPSSSAEHTCSGSQWWKLESLSE

SEQ ID NO: 11521 - protein, 330 aa, Magnaporthe grisea 70-15
MDGKRHLNSFQQLEKLGEGTYATVFKGRNRHTGELVALKEIHLDSEEGTPSTAIREISLMKELKHENIVGLHDVIHTENKLMLVFEHMDGDLKKYMDTKGDRGALQPMVIKSFMYQLLKGIDFCHQNRVLHRDLKPQNLLINNKGALKLGDFGLARAFGIPVNTFSNEVVTLWYRAPDVLLGSRTYNTSIDIWSAGCIMAEMFTGRPLFPGTTNEDQIVRIFRIMGTPSERTWPGFSQFPEYKKTFHTYATQDLRNILPQIDATGIDLLGRMLQLRPEMRISAHDALKHPWFNDILMQQHQQQHAIQAQAQAHQARTQSGSTDTFAGAAV

SEQ ID NO: 11522 - protein, 392 aa, Oryza sativa (japonica cultivar-group)
MADEWWSASQRSHGTSACSAAPSPLTADRVSCGWTSPAAAAAAESTSSITFQDPSRSSAAHHQPLSDAASSLGDPHMVDWTQAFLSGRSDASFQAVLQDDMAASTRPFRAQPTAADEAVMTNPFRDMGVGQGLLLDQASAPLHGLSFDAGEPAVAPATHSITTSFGDYQHSASYDAAAAVMQFSQTPRAPSLPAAAQMQFLSGSYQLPFGGAPPLPSQLLLQAMQPKPSCSSNANTLLAKSNSGSAQQICSSEGRKSVSDSPAAAKRPRIEVPSPLPTFKVRKEKLGDRITALQQLVSPFGKTDTASVLHEAIEYIKFLHEQVASLSSPYLKNGNPLQHFQQKGSESTKDAEQPKPDLRSRGLCLVPVASTYTVASETVPEFWHPTFGGTFR

SEQ ID NO: 11523 - protein, 146 aa, Candida albicans SC5314
MSNLQDLINHDDDEYLPSPSPPQQPEPQHASSSELKTSTTEDLPDSVTQEHILTSFEKIKTHFPAARIKKIMQSDEEIGKVAQATPVIVGRALEIFMANLVEVSLLEAKKQGVKRITASHVKSAIENTEQFDFLVEAVEKYPSLKN

SEQ ID NO: 11524 - protein, 423 aa, Methanocaldococcus jannaschii DSM 2661
MLLKNCRIIKDNKIIEGDILIDENGRIKKIAKDIKVDDEIIDIKNSLVIPGVIDAHVHFRWGEEKKEDFLSGSLAGINGGVCFAIDMPNNKPPITTKELFYKKLEDCKKDSKINVFLNFGVTENNYLGTVEDAKAYKIFMVKSVGDLFIEDYSKLKDILNQNKLFCIHAEHKDVINENLKKYQLNSWIDHCKIRDEKSEVEAVKEVIKNLKIIDRQSNKKPHVHFCHISTKEALYLIKKVRQELKNIKITVEVTPHHIYLNKDMAEELKGFGKFNPPLREKDDNIALIKGIVNKDVDIIASDHAPHLLEDKLKNVKNCPSGIPGIETIVPLTLNLVNKGLISLFDAIRVLSKNPAKIFNINNKIEEGNLANLTIIDLKKEGKINAELFKSKAKFSPFDGWEVKGFPIYTVINGTLYEAYGCKC

SEQ ID NO: 11525 - protein, 408 aa, Polanisia dodecandra
YQGVYPVKGNQDRFVVEDIVKFGSSFRFGLEAGSKPEILLAMSCLCKGNPEAFLVCNGFKDAEYISLALLGRKLALNTVIVLEQEEELDLVIDLSQKMNVRPVIGIRAKLRTKHSGHFGSTSGEKGKFGLNTIQIVRVVRKLCQVGMLDCLQLLHFHIGSQIPSTALLSDGVAEAAQLYCELVRLGAQMRVIDVGGGLGIDYDGSKSGESDLSVAYSLEEYAAAVVAAVQFVCERKSVKHPVICSESGRAIVSHHSVLIFEAVSATGPARHAVTPTDLQLMIEGYSEEARADYQNLYAAVMRGEYESCLLYVDQLKQRCVEGFKEGFLSIEQLAAGDGFCELVLKVIGASDPVRTYHVNLSVFTSIPDFWGIGQLFPIVPIHRLDQRPGVRGILSDLTCDSDGKIEKF

SEQ ID NO: 11526 - protein, 129 aa, Thermoplasma acidophilum
MSWQEAEVRELKVGRYILIDDAPCKIVEITMSKPGKHGEAKGRIVAIGVFDNQKRSVVYPVKHKVKIPIIEKKNAQVLSVQNNEVQLMDSETFETFVLPLDPEIADKIKPGMEVPYWETMGMRKIMLQN

SEQ ID NO: 11527 - protein, 313 aa, Zea mays
MQGGATAKQQARDGDRGAAKTPTTEGKGDAAGAKASADVAKGDAAVAKAAGDDVVVGKGDAGNKAGAGAMHHGLSAVEAKDSQTIVALQSPVTVMRPVRGDLEEHLPKPYLARALVAPDIYHPDGTAADEHGHHHMSVLQQHVAFFDRDDNGIIYPWETYSGCRALGFNMILSLLIALVVNGTMSYATLPGWLPSPLFPIYVHNIHKSKHGSDSGTYDNEGRFMPVNFENLFSKYARTSPDRLTYRELWSMTEGFRDAFDLYGWIAAKLEWTILYVLARDDEGYLSREAMRRVYDGSLFEYVERQRAQHAKMS

SEQ ID NO: 11528 - protein, 469 aa, Methanosarcina mazei Go1
MSKNVQKIEKLLIVICMIFIVLPSPALAVTAEENAEAIEGLQTTLTFLWLLIASGLVFFMHAGFSLVETGLTRSKNTANILMKNFMTVVLGILVYWAVGWGVMYGADAAGLIGTDQFFLAGADNATWNSWFFQMVFAATGATIVSGAMAERTNFKAYLVYCVLMVAVIYPIYGHWVWSGADTALLSGADSPIVKAIGVAHHDFAGSGVVHSIGGYSALAGVLLVGARIGKFRDGKAIPIPGHNLTIAFLGTLILALGWLGFNGGSTLNANDPYMNLVVVNTFLAGAVGAVTTMAITWMKTGKPDPSLTANGLLGGLVAVTAPCGSISNWGAIAIGIIAGIIIYAGVMFNENKLKLDDPVGAIAVHGYCGTWGLISVGLFSIGIGNGILADASYAAAVPGLFYGGGVSLLLIQLVAVLITIVWGFGLSFIIFKILDAVIGLRVSEEEEIMGLDICEHGIRAYPEYLMREE

SEQ ID NO: 11529 - protein, 436 aa, Vibrio parahaemolyticus RIMD 2210633
MTLTRRQQIEALEKDWATNPRWKNVKRTYTAEEVVELRGSMVPANTIAQRGADKLWSLVNGSAKKGYVNCLGALTGGQAVQQAKAGIEAIYLSGWQVAADNNTASTMYPDQSLYPVDSVPSVVKRINNSFRRADQIQWANGKSPEDEGGIDYFLPIVADAEAGFGGVLNAYELMKSMIEAGAAGVHFEDQLASVKKCGHMGGKVLVPTQEAVQKLVAARLAADVSGTTTLVIARTDANAADLLTSDCDPYDKDFIEGERTQEGFYRVRAGIDQAISRGLAYAPYADLIWCETATPCLEEARKFAEAIHAEYPDQLLAYNCSPSFNWEKNLDAETIAKFQQELSDMGYKYQFITLAGIHNMWFNMFELAHAYAQGEGMRHYVEKVQRPEFQAAEKGYTFVAHQQEVGTGYFDRMTNTIQGGNSSVTALTGSTEEDQF

SEQ ID NO: 11530 - protein, 407 aa, Arabis drummondii
YQGVYPVKGNQDRFVVEDIVKFGSSFRFGLEAGSKPEILLAMSCLCKGSPDAFLVCNGFKDAEYISLALLGRKLALNTVIVLEQEEELDLVIELSQKMNVRPVIGLRAKLRTKHSGHFGSTSGEKGKFGLTTTQIVRVVRKLSQSGMLDCLQLLHFHIGSQIPSTSLLSDGVAEAAQLYCELVRLGAHMKVIDIGGGLGIDYDGSKSGESDLSVAYSLEEYAEAVVASVRFVCDRRSVKHPVICSESGRAIVSHHSVLIFEAVSADKPMVHQATPDDIQFLLEGDEEARANYEDLYAAVMRGDHESCLLYVDQLKQRCVEGFKEGVLSIEQLASVDGLCEWVLKAIGASDPVHTYNINLSVFTSIPDLWGIDQLFPIVPIHKLDQRPGTRGILSDLTCDSDGKINKF

SEQ ID NO: 11531 - protein, 422 aa, Aquifex aeolicus VF5
MLKLIVKNGYVIDPSQNLEGEFDILVENGKIKKIDKNILVPEAEIIDAKGLIVCPGFIDIHVHLRDPGQTYKEDIESGSRCAVAGGFTTIVCMPNTNPPIDNTTVVNYILQKSKSVGLCRVLPTGTITKGRKGKEIADFYSLKEAGCVAFTDDGSPVMDSSVMRKALELASQLGVPIMDHCEDDKLAYGVINEGEVSALLGLSSRAPEAEEIQIARDGILAQRTGGHVHIQHVSTKLSLEIIEFFKEKGVKITCEVNPNHLLFTEREVLNSGANARVNPPLRKKEDRLALIEGVKRGIIDCFATDHAPHQTFEKELVEFAMPGIIGLQTALPSALELYRKGIISLKKLIEMFTINPARIIGVDLGTLKLGSPADITIFDPNKEWILNEETNLSKSRNTPLWGKVLKGKVIYTIKDGKMVYKD

SEQ ID NO: 11532 - protein, 477 aa, Deinococcus radiodurans R1
MTATPQASARPERPFATVNPYTGETVKTFPFLESAEIPALIERADQAYREWGQRPVTERAAIMRRAAELMLERTDELASLITLEMGKLLREAKGEVALAASILNYYGEQGPSFLEPKTIPVPQGEAAVLHAPLGVLLGIEPWNYPLYQVVRFAAPNLVVGNTVLLKHSELCPQSALALEQLFHDAGVPQGAYTNLFLRIADIEQVIAHPAVQGVSLTGSERAGASVAELAGRHLKKCVLELGGSDPFIVLDAEDLDTTVKAAATGRLSNTGQACIAAKRLMVVDDLYDEFVSRLGQTFSAFVPGDPADPSTRLGPLSSEQAARDLQAQVQDAIDKGATVVAGGQRPEHPGAFVQPTVLTDVTPDMRAYHEELFGPVAVVYRVRDEDEAVALANASTYGLGGAVFSSDLDRAQRVAERLDTGMVWINHPTSSAADLPFGGVKRSGFGRELSSMGMLEFTNQKLVRAFPTKQKPAQVAG

SEQ ID NO: 11533 - protein, 223 aa, Zea mays
MPDSDNDSGGPSNAGGELSSPREQDRFLPIANVSRIMKKALPANAKISKDAKETVQECVSEFISFITGEASDKCQREKRKTINGDDLLWAMTTLGFEDYVEPLKHYLHKFREIEGERAAASAGASGSQQQQQQGELPRGAANAAGYAGYGAPGSGGMMMMMMGQPMYGGSQPQQQPPQPQPPQQQQQQHQQHHMAMGGRGGFGQQGGGGGSSSSSGLGRQDRA

SEQ ID NO: 11534 - protein, 133 aa, Gloeobacter violaceus PCC 7421
MIQQQSRLSVADNTGARELLCIRVLGSTVGSKGLTKGGGNRRYAFVGDIVVAVVKDAAPNMGVKKSEVVRAVVVRTRQAIRRDNGMVIRFDDNAAVIIDKNGNPRGTRVFGPVARELREKNFTKIISLAPEVL

SEQ ID NO: 11535 - protein, 407 aa, Barbarea vulgaris
YQGVYPVKGNQDRFVVEDIVRFGSPFRFGLEAGSKPEILLAMSCLCKGSPDAFLVCNGFKDAEYISLALLGRKLALNTVIVLEQEEELDLVIDLSQKMNVRPVIGLRAKLRTKHSGHFGSTSGEKGKFGLTTTQIVRVVSKLSQSGMLDRLQLLHFHIGSQIPSTSLLSDGVAEAAQLYCELVRLGAHMKVIDIGGGLGIDYDGSKSGESDLSVAYSLEEYAEAVVASVRFVCDRRSVKHPVICSESGRAIVSHHSVLIFEAVSADKPMVHQATPDDIQFLLEGNEEARANYEDLYAAVMRGDHESCLLYVDQLKQRCVEGFKEGVLSIEQLASVDGLCEWVLKAIGASDPVHTYNINLSVFTSIPDLWGIEQLFPIVPIHKLDQRPGARGILSDLTCDSDGKINKF

SEQ ID NO: 11536 - protein, 425 aa, Staphylococcus epidermidis ATCC 12228
MKLIKNGKILKNGILKDTEILIDGKRIKQISSKINASSSNIEVIDAKGNLIAPGFVDVHVHLREPGGEHKETIESGTKAAARGGFTTVCPMPNTRPVPDTVEHVRELRQRISETAQVRVLPYAAITKRQAGTELVDFEKLALEGVFAFTDDGVGVQTASMMYAAMKQAVKVKKPIVAHCEDNSLIYGGAMHKGKRSEELGIPGIPNIAESVQIARDVLLAEATGCHYHVCHVSTKESVRVIRDAKKAGIHVTAEVTPHHLLLTENDVPGDDSNYKMNPPLRSNEDREALLEGLLDGTIDCIATDHAPHAKEEKAQPMTKAPFGIVGSETAFPLLYTHFVRRGNWSLQQLVDYFTIKPATIFNLNYGKLHKDSYADLTIIDLNTEKEIKSEDFLSKADNTPFIGEKVYGNPTLTMLKGEVVFEEEK

SEQ ID NO: 11537 - protein, 493 aa, Schizosaccharomyces pombe
MAPQFKRPELFGFDKSHAQSFVQGKWISSPNNKTFEVDNPATGEIIGKVADVSVEETKKAISAANEAFKTYKNFTHVQRSQLLERWAELIMENKDDLVKMLTLENGKPLSQAEMEVTTCSGYLKWYAAEAVRTFGDVAPSSLQSQNFLISIKQPVGVSALITPWNFPAAMIARKGGAALAAGCTAIFLPAFRTPYVCLGLVRLAQEAGFPDGVLNVITSSDASAHGKELTTNPIVRKVSFTGSTNVGKILMGQSASTIKKVSMELGGNAPFIVFPDFPIDQAVESFCTIKFNSCGQVCVCPNRVYVHKNVYDEFVSKLTEKVKTIKVGDGFDSSSAVGPLISQDGCKKVSKHIEDAVSKGAKITVGGKEISSSKGYFFEPTVLSGVTQDMLVASEETFGPLASVFKFDDTEEVIEWANDSDVGLAGYVFTNNLSTMIHVAKELEVGLVGANIEMVDEPFISFGGIKQSGFGKEAGRLGVQEFMVVKEINLKTL

SEQ ID NO: 11538 - protein, 212 aa, Arabidopsis lyrata subsp. petraea
VVIDNLTNVWARLYVPMMTTTKSSVSKLLPLIVYFHGGGFCVGSTSWSCYHEFLARLSSRSRCMVMSVDYRLAPENPLPAAYEDGVNAILWLNKARNDNLWTKLCDFGRIFLAGDSAGGNIADQVAARLASTEDLTLKIEGTILIQPFYGGEERTESEKRVGNNKSSVRTLEGSDAWWRLSLPRGADREHPYCKPVKINSSTVIRTLVCVAE

SEQ ID NO: 11539 - protein, 428 aa, Pseudomonas aeruginosa
MADKKAQLIIEGSAPVELPVLSGTMGPDVVDVRGLTATGHFTFDPGFMSTASCESKITYIDGDKGVLLHRGYPIEQLAEKSDYLETCYLLLNGELPTAAQKEQFVGTIKNHTMVHEQLKTFFNGFRRDAHPMAVMCGVIGALSAFYHDSLDITNPKHRQVSAHRLIAKMPTIAAMVYKYSKGEPMMYPRNDLNYAENFLHMMFNTPCETKPISPVLAKAMDRIFILHADHEQNASTSTVRLAGSSGANPFACIASGIAALWGPAHGGANEAVLRMLDEIGDVSNIDKFVEKAKDKNDPFKLMGFGHRVYKNFDPRAKVMKQTCDEVLQELGINDPQLELAMKLEEIARHDPYFVERNLYPNVDFYSGIILKAIGIPTSMFTVIFALARTVGWISHWQEMLSGPYKIGRPRQLYTGHTQRDFTALKDRG

SEQ ID NO: 11540 - protein, 392 aa, Zea mays
  unsure (1)..(392): unsure at all Xaa locations
MEVGDARNGSAAAALTKGSADDAARKPLPPCCVKAKARVPETEANCHDTVVSGWFTEPRSRFGKTSKVQYFNNPMWPGEAHSLKVEKILFQGKSPYQEILVFESSTYGNVLVLDGIVQLTDKDECAYQEMVTHXFPLCSIPAPKNVLVVGGGDGGVLREIARHDSVETIDICEIDQLVIDVCKEFFPNLSIGFKDPRVRLHVGDAVDFLRNSPEGKYDAIIVDSSDPIGPAQGTRWRKLFIQTIARALKPGXGVLCNLAESMWLHTHLIQDMLAICRQTFKGAVHYAWTSVPTYPSGVIGFLLCAKEGRAVNFLTPVNPIEKIEGTTKAGRELRFYNSEIHRAAFVLPTFVRRELEAYTTPSTSAENEKPKESVSEPQKIKILSNNAILTAS

SEQ ID NO: 11541 - protein, 452 aa, Burkholderia fungorum LB400
MLIAPCDKPGRRPALNNYIMRNEMTTRANLTSPKTNDYVSREEALEILAVKMQSFYTYVSRGLIRRLDQPGKKRKLYLKSDVQRLAAKSQARSNTGAKAGDSMRFGNPIIQTWICEITPRGPCYRSRLATDLAAANVSYESVAELLWLGTFRTPEVPWKAEPLPKGLDAWIPLAKSMAGTGNGLQIINLLLAALRALDGNELDTNYDNVIPLARRLIQVLAGVGGFLGEDQQLERFRTGDSVAECFVRGLGFGGRPEVSEAINKALVISAEHELTPPTFAARVCASTGSDLYACVATGILAHMGSLQGGGADGAEVVLEDLLRPARRKMLRQRWATKYDFPGFNHPLYERDPRAVALLDIVRGLKSPHPDASKALKLIDEIEQEVNFYPNITAALVVLCRSLGLPRRAANLLFSVSRSAGWIAHALEQRVAGYMLRPRAKFSSQSDSLTNNV

SEQ ID NO: 11542 - protein, 445 aa, Zea mays
  unsure (1)..(445): unsure at all Xaa locations
MYRAKRAALSPKVKRRVGKYELGRTIGEGTFAKVRFAKNTENGEPVAIKILDKEKVKRHRLVEQIKREICIMKLVRHPNVVRLFEVMGSKARIFIVLEYVTGGELFEIIATNGRLKEDEARKYFQQLINAVDYCHSRGVYHRDLKLENLLLDAAGNLKVSDFGLSALTEQVKADGLLHTTCGTPNYVAPEVIEDGGYDGATADIWSCGVILFVLLAGYLPFEDDNIIALYKKISAAQFSCPSWFSAGAKNMSTSCLDFLFTTTMVVLSRFEXLENEPAVDLRTGGSGSRVSGHVAPPKSPDFFQEYGMGNXFQKKSNNASKTQVEETDEARKKFSNAKAITTSQFLQCPPXEIITKIEEAAKPLGFDVQKKKYKMRMENPKAGRKGNLNVATEVFQIAPSLHVVELKKAKGDTLEFQKFYRSLSTQLKDVVWKCDGEVDGNSAAA

SEQ ID NO: 11543 - protein, 140 aa, Brassica napus
RASNVVYLRCAAELLEMTEEYGEGNLISQTETFFNQVVLKSWEDSVKALQSCDEVLEYADELNITKKCIESLAMRAFTDPNLFGWPVVEHGGGPMQSPGGSVLWNGISTGARPRQTNSDWWYEDASMLSFPLFQRLITVM

SEQ ID NO: 11544 - protein, 315 aa, Hyoscyamus niger
MEVTNQSNGCSNNEKESPYISSVLPGWFSEISPLWPGEAHSLKVEKILFQGKSDYQNVMVFQSSTYGKVLVLDGVIQLTERDECAYQEMITHLPLCSIPNPKKVLVIGGGDGGVLREVSRHSSVEQIDICEIDKMVVEVAKEFFPDVAVGYEDPRVNLHIGDGVAFLKNVPAGTYDAVIVDSSDPIGPAQELFEKPFFESIARALRPGGVVSTQAESIWLHMHIIEEIVANCRQIFKGSVNYAWTTVPTYPSGMIGFMLCSTEGPAVDFKNPINPIDDESGPKTIAPLKFYNSEIHQASFCLPSFAKRVIESKGK

SEQ ID NO: 11545 - protein, 201 aa, Streptococcus agalactiae
AIKQQTIFDIDNAKTEVEIDNLVHDAFSKMNATVAKFQKGLETNTPETPDTPKIPEIPQAPDTPQAPDTPHVPESPKAPEAPRVPESPKTPEAPHVPESPKAPEAPRVPESPKTPEAPHVPESPKTPEAPKIPEPPKTPDVPKLPDVPKLPDAPKLPDGLNKVGQAVFTSTDGNTKVTVVFDKPTDADKLHLKEVTTKELA

SEQ ID NO: 11546 - protein, 201 aa, Streptococcus agalactiae
AIKQQTIFDIDNAKTEVEIDNLVHDAFSKMNATVAKFQKGLETNTPETPDTPKIPELPQAPDTPQAPDTPHVPESPKAPEAPRVPESPKTPDTPHVPESPKAPEAPRVPESPKTPEAPHVPESPKTPEAPKIPEPPKTPDVPKLPDVPKLPDAPKLPDGLNKVGQAVFTSTDGNTKVTVVFDKPTDADKLHLKEVTTKELA

SEQ ID NO: 11547 - protein, 471 aa, Vibrio vulnificus YJ016
MAMKLVWLRRDLRCVDNTALNHAIATSQEVVACFVATPLQWRDHHMAPMQADLIARRLAVLAEELNALNIPLLYDEVDDYAQSATRVANWAEQLAVSEVVLNREYEVNERVRDEQLVNRLASSEMGVLDVEDKCVQAPGCVLNKQGDYFKVFTPFKKAWLKSFIPPQIIKTSAAQPVVLPEALQSSLWHEQAPFSYPRQSSEAWSVDSQQIRETLRRFCHEEVDRYHEQRDFPATAGTSVLSPYLAIGAISVRQCIARLYWQQSYLSNGREVWLSELIWREFYHHLIHFEPKLVKGQGFVEWEKHLLWPAKPDWFERWCRGETGYPIVDAAMRQLNQTGWMHNRLRMIVASFLTKDLHVNWRLGEQYFMQKLVDGDFAANNGGWQWCASTGCDGQPYFRIFNPITQGEKFDPNGEFVKHWLPELAEVPSKFVHQPWKWLGHMRLDYPAPMVDHKQEREITLSLYTQAKDCL

SEQ ID NO: 11548 - protein, 310 aa, Neurospora crassa
MADHTEVDLDSIIDRLLEVRGSRPGKQVQLLEAEIRYLCTKAREIFISQPILLELEAPIKICGDIHGQYYDLLRLFEYGGFPPEANYLFLGDYVDRGKQSLETICLLLAYKIKYPENFFILRGNHECASINRIYGFYDECKRRYNIKLWKTFTDCFNCLPIAAIIDEKIFTMHGGLSPDLNSMEQIRRVMRPTDIPDCGLLCDLLWSDPDKDITGWSENDRGVSFTFGPDVVSRFLQKHDMDLICRAHQVVEDGYEFFSKRQLVTLFSAPNYCGEFDNAGAMMSVDESLLCSFQILKPAEKKQKYVPSLR

SEQ ID NO: 11549 - protein, 469 aa, Capsicum chinense
PIPVPVFGNWLQVGDDLNHRNLTDYAKKFGDIFLLRMGQRNLVVVSSPESAKEVLHTQGVEFGSRTRNVVFDIFTGKGQDMVFTVYGEHWRKMRRIMTVPFFTNKVVQQYRGGWESEVASVVEDVKKNPESATNGIFLRKRLQLMMYNNMFRIMFDRRFESEDDPLFVKLRALNGERSRLAQSFEYNYGDFIPIFRPFLRGYLKICKEVKEKRLQLFKDYFVDERKKLANTKSMDSNALTCAIHHILDAQQKGEINEDNVLYIVENINVAAIQTTLWSIEWGIAELVNHPHIQQKLREEIDTVLGPGVQVTEPDTQKLPYLQAVIKETLRLRMAIPLLVPHMSLHDAKLAVYDIPAESKILVNAWWLANNPAHWKKPEEFRPERFLEEEKHVDANGNDFRFLPFGVGRRSCPGIILALPILGITLGRLVQNFEMFPPPGQSKLDTSEKGGQFSLHILKHSTIVMKPRSF

SEQ ID NO: 11550 - protein, 207 aa, Streptococcus agalactiae
AIKQQTIFDIDNAKTEVEIDNLVHDAFSKMNATVAKFQKGLETNTPETPDTPKIPELPQAPDTPQAPDTPHVPESPKAPEAPRVPESPKTPEAPHVPESPKAPEAPRVPESPKTPEAPHVPESPKTPEAPKIPEPPKTPDVPKLPDVPKLPDVPKLPDAPKLPDGLNKVGQAVFTSTDGNTKVTVVFDKPTDADKLHLKEVTTKELA

SEQ ID NO: 11551 - protein, 138 aa, Triticum aestivum
VAPFQGLKSTAGLPVSRRSNGASLGSVSNGGRIRCMQVWPIEGIKKFETLSYLPPLSTEALLKQVDYLIRSKWVPCLEFSKVGFIFREHNASPVEVEEVKKEYPDAYVRIIGFDNMRQVQCVSFIAFKPPGCEESGKA

SEQ ID NO: 11552 - protein, 251 aa, Glycine max
  unsure (1)..(251): unsure at all Xaa locations
MTKNYPAVSEEYQKAIEKCKRKLRGLIAEKNCAPIMVRLAWHSAGTFDCASRTGGPFGTMRFDDELAHGANNGLHIALRLLEPIREQFPTXISHADFHQLAGVVAVEVTGGPEIPFHPGREDKSQPPPEGRLPDATKGCDHLRQVFLKQMGLTDQDIVALSGAHTLGRCHKDRSGFEGAWTSNPLIFDNSYFKELLSGEKEGLLQLPSDKALLDDPVFRPLVEKYAADEEAFFADYAEAHLKLSELGFADA

SEQ ID NO: 11553 - protein, 245 aa, ASPERGILLUS NIDULANS FGSC A4
MKSPIPLLHGTGSIPPIGLGTWQSSANATCLAVKHALQHGYRHIDTALNYGNEKEVGQGIRDSGIPREEIWVTTKLDNHWHHRVREGLESSLRDLGLEYVDLYLIHFPCSTDPEDRSKHLKDWDFVRTWQEMQKLLGTGKVRNIGVSNFQISHLERLLNDPSCKVIPAVNQIELHPYNPSLRWNLQRGVSVIPKSITPARIDSNIDLEGFELSPDEMGEISAIKTRAKVVGDSWMPIRVFTGDDE

SEQ ID NO: 11554 - protein, 207 aa, Streptococcus agalactiae
AIKQQTIFDIDNAKTEVEIDNLVHDAFSKMNATVAKFQKGLETNTPETPDTPKIPELPQAPDTPQAPDTPHVPESPKAPEAPRVPESPKTPDTPHVPESPKAPEAPRVPESPKTPEAPHVPESPKTPEAPKIPEPPKTPDVPKLPDVPKLPDVPKLPDAPKLPDGLNKVGQAVFTSTDGNTKVTVVFDKPTDADKLHLKEVTTKELA

SEQ ID NO: 11555 - protein, 267 aa, Xanthomonas campestris pv. campestris str. ATCC 33913
MTVPAFGLGTFRLKDQVVIDSVRNALALGYRAIDTAQIYDNEAQVGQAIADAGVPRDQLFVTTKIWVDRFSRDTLQPSLQESLRKLGTDYVDLTLIHWPSPKDQVPMREYLEALADAKAQGLTRAIGVSNFTIALTRQAIEILGADAIATNQIEVHPYLQNRTLIAFLREQGIHVTSYMTLAVGEVLKDPVIQAIARRHDATPAQVTLAWALQQGYSVIPSSTKRANLESNLKAQSLHLSEQDMAEIAALDRGERLANPKAIAPDWD

SEQ ID NO: 11556 - protein, 213 aa, Streptococcus agalactiae
AIKQQTIFDIDNAKTEVEIDNLVHDAFSKMNATVAKFQKGLETNTPETPDTPKIPELPQAPDTPQAPDTPHVPESPKAPEAPRVPESPKAPEAPRVPESPKTPEAPHVPESPKAPEAPRVPESPKTPEAPHVPESPKTPEAPKIPEPPKTPDVPKLPDVPKLPDAPKLPDGLNKVGQAVFTSTDGNTKVTVVFDKPTDADKLHLKEVTTKELA

SEQ ID NO: 11557 - protein, 197 aa, Populus kitakamiensis
MAFAGTTQKCMACDKTVYLVDKLTADNRAYHKACFRCHHCKGTLKLGNYNSFEGVLYCRPHFDQLFKRTGSLDKSFEGTPKIVKPEKPVDGEKPVSTKVSTMFAGTREKCFGCKNTVYPTEKVSVNGTPYHKSCFKCIHGGCTISPSNYIAHEGRLYCKHHHNQLIKEKGNLSQLEGDIEKDSMSNKTNGREVAAES

SEQ ID NO: 11558 - protein, 461 aa, Mycobacterium tuberculosis H37Rv
MTATLTKTLGSLDDFRGTLCVPGDPDYPRVRAIWNGQVAREPALIATCHDACDVRTVLRRAVDAGMVTAVRGGGHNVAGTALCDGGVVIDLSAMRAVSLDPATGRVRVQGGATLADLDHATVPFARVAPAGIVTTTGVGGLTLGGGVGWTTRRFGLSCDNLVAVRLVTAAGDYLSVDDERDPELMWGLRGGGGNFGIVTEFEFATHPFGPVAVAGFVVYRLDDGPAVLRGYRQFAAAAPEEVTTIVVLRHAPPAPWIPVDQRGKPVVMIGAVHTGSIQTGIEALRPVKSLARPVADTVWPTPFLAHQAVLDASNPAGHRYYWKSDHLAELNDEAIDLLVEQTAQLSSPDSLIGIFQLGGAAARGGERSCFPSRHARFMVNYATHWTEAREDDLHRQWTRDAIEALAPYGLGTAYVNFTADDAPMHVETLYSTTEFSRLVTLKNRLDPDNVFRNNHNIRPSA

SEQ ID NO: 11559 - protein, 289 aa, Hordeum vulgare
ITTTTMQFNPSGLELERPQQLFPQWQPLPQQPPFLQQEPEQPYPQQQPLPQQQPFPQQPQLPHQHQFPQQLPQQQFPQQMPLQPQQQFPQQMPLQPQQQPQFPQQKPFGQYQQPLTQQPYPQQQPLAQQQPSIEEQHQLNLCKEFLLQQCTLDEKVPLLQSVISFLRPHISQQNSCQLKRQQCCQQLANINEQSRCPAIQTIVHAIVMQQQVQQQVGHGFVQSQLQQLGQGMPIQLQQQPGQAFVLPQQQAQFKVVGSLVIQTLPMLCNVHVPPYCSPFGSMATGSGGQ

SEQ ID NO: 11560 - protein, 180 aa, Spinacia oleracea
MASSVLSSAAVATVSRTPAQASMVAPFTGLKSTVGFPATKKNDDITSLASNGGRVQCMKVWPTQNMKRYETLSYLPPLTTDQLARQVDYLLNNKWVPCLEFETDHGFVYREHHNSPGYYDGRYWTMWKLPMFGCTDPAQVLNELEECKKEYPNAFIRIIGFDSNRQVQCVSFIAYKPAGY

SEQ ID NO: 11561 - protein, 197 aa, Populus kitakamiensis
MAFAGTTQKCMACDKTVYLVDKLTADNRAYHKACFRCHHCKGTLKLGNYNSFEGVLYCRPHFDQLFKRTGSLDKSFEGTPKIVKPEKPVDGEKPVSTKVSTMFAGTREKCFGCKNTVYPTEKVSVNGTPYHKSCFKCIHGGCTISPSNYIAHEGRLYCKHHHNQLIKEKGNLSQLEGDIEKDSMNNKTNGREVAAES

SEQ ID NO: 11562 - protein, 191 aa, Saccharomyces cerevisiae
MQTLKCVVVGDGAVGKTCLLISYTTNQFPADYVPTVFDNYAVTVMIGDEPYTLGLFDTAGQEDYDRLRPLSYPSTDVFLVCFSVISPPSFENVKEKWFPEVHHHCPGVPCLVVGTQIDLRDDKVIIEKLQRQRLRPITSEQGSRLARELKAVKYVECSALTQRGLKNVFDEAIVAALEPPVIKKSKKCAIL

SEQ ID NO: 11563 - protein, 1684 aa, GIBBERELLA ZEAE PH-1
MPGSTIDTPAVALSFANNFWGKEDAGVTPLLSRMTAAKTTCDELRAFYGARASIEEEYSRKLLNLSRKALGSQESGTLKTSLDTVRGEVEQMAKQHQLIGAEMKSELEEPLAAFTGGMKERRKIIQNTVEKLLKVKMQQTQQVNKTRDKYEQECLKIKGYLAQGHMVMGQEERRNKAKLEKTQIALAASSTEYENAVKALEDTTARWNREWKAAADKFQDLEEERLDFTKSSMWTFANIASTVCVSDDSSCEKIRLSLEVMDVEKDIITFITEKGTGQEIPDAPKYINFCRGDVTDNQSETSEDDNYSVAQFPRMINPAFRSSSPQPSTFESHHDPNSALAKELAHKDNAPAKREPNAPVQKSATLPPDDILQIGPQKTQPQQIQAAPQQRQQHQPQMQHSSQLQHPSQLQHHSQLQRPSQMQRPSQLQHPSQLQHSSQPHHPSQLQHPSQLQHPSQSQRSSQPQRPSQHPAQLQHQPQQQYSPQRQHPSQQPPHSADHRMQQQMRPLEMRPADMRNANMRQHEPRPSLEMRYSGEVRPSMQSRPSVDTRQVPDARTSLELRRPIEDPSRRQQPATYTAYDANQHGAVSAVPHDPYAAEGMTMLCRTGPSPISDHDSQVTSARPSSRDSHSDYSNPNSFSSVEPPSGKTSPVKQDPIRQDPAPAPAPAPVQTRAPPPVTAPAPAPVQARAPAPVAAPAPVPVQARASVPTPVPALTPAPKPAPAPVAAASAPTPSAVTPATSPVKLVAKKKSGGFLKNHSPFRRKSQKELQQPNRNTWHASNTPSLSSPVRRAQPQTHEPTNNVVTQERTQSPEPIDANASLALGVGQNVFPVSTPDTKKKPGAAAAQEPAEEMDPIALALAELKGVTLGKNSSMRVSADHYSGIATPASGSEAASRQASATRPAPTPSNPDIAAAKRGTPPPSYQTPTSRLGVPPPAVTSRAMKEATKKATSQTRSMFENGGSTPGTFNSTSSRTNTRATEAKRAEPSLSQSVPPTASRPTTRTATHGRGESGSYSSASMSRPGTRGTEMGRGEPAGYGTSPARSGTRATDMSRPDTRGFNASPLSRPGTRGSDMSRGGSGIYGTSPGSRPGTRGTDMPRATSPAPAPARSVSPQPPINDNMSYRSVSPNPYAASQRSPSVMSSPQKHGSAQGYYPQSPASRGPSPSPYGQQSRPGSGYAGSDMAIQLAPVSDPYGSVRSGGSRPASRANSYYDDGSTRQRSQSVADPSRLYTPDGRAILHYARALYMYQAAIPEELGFAKGDYLAVLRHQDDGWWEAEVHGGDGSVGLVPIVTQLTEYMLRIGELIRLSMETLQETARVVTSKPVQRAVVNTVLLVSTAATLFCTAAIASVLFFQNFLPHEVVTLPVHLQYGSGINPYGIASLQTPPMKTQQEYDVSLLLSMPRSVPNVERGNFMISLHMLGAKADVWLHAQAEQHASSHEGFGQANVLFSSRRPALFPYVDPLVSVASRVLFLIYHLFTPGSSTNSVIIPLAERVSFSKDSLLPKSAYIEVEAGQTIQVYNAYLQLTAQLRGLRWMMVHYRISTFLALTVVFWAFEVIFMGVAWGIWSVASGPAEEDDAKIRRLKGLRDDHEDEPTDHEETFPTYGKQQPLKYEPDIKPEQDPEQPLSEIPRLGADADDEDDGSFDDKDEEDVQHRDSGIGTSYSEEGTSSIRRRTSRNRL

SEQ ID NO: 11564 - protein, 294 aa, GIBBERELLA ZEAE PH-1
MTSKLALSSTKKLNSGYQIPLLGYGVYQVPKDQASDVCKKALEIGYRHIDSASGYYNQGPSAAGIQAAGVPREEVFFTTKIFTRQFPLNYENAHKQVDIALDETKLDYLDLVLIHAPYGGSDARKGAWKALVECVEAGKVRSLGVSNYGVHHLDELEAYIKELETERGGAGKGGVISVGQWEVHPWMTRPDIVKWCQDRNIAVEAYCPIVRGERFDDPKVKALAEKYGKSPAQILLRWSLQRGYVPLVKSVTPSRILENTQLYDFELTEEEVEDLATTDYSPCAWDPTVEPLEK

SEQ ID NO: 11565 - protein, 403 aa, Brassica oleracea
YQGVYPVKGNQDRFVVEDIVRFGSQFRFGLEAGSKPEILLAMSCLCKGNPDAFLVCNGFKDAEYIFLALLGRKLALNTVIVLEQEEELDLVIDLSQKMNVRPVIGLRAKLRTKHSGHFGSTSGEKGKFGLTTTQIVRVMRKLSQSGMLDCLQLLHFHIGSQIPSTSLLSDGVAEAAQLYCELVRLGAHMKVIDIGGGLGIDYDGSKSGESDLSVAYTLEEYAEAVVASVRFVCDRRSVKHPVICSESGRAIVSHHSVLIFEAVSAVKPMAHQANPDDIQFLLEGNEEYEDLYAAVMRGDHESCLLYVDQLKQRCVEGFKDGVLSIEQLASVDGLCEWVLKAIGASDPVHTYNINLSVFTSIPDLWGIEQLFPIVPIHKLDQRPGTRGILSDLTCDSDGKISKF

SEQ ID NO: 11566 - protein, 164 aa, Glycine max
  unsure (1)..(164): unsure at all Xaa locations
PTYARNGSRGLNPGSFLTITEGSDSGGYYGQWRTIRRTAVTTTLAGSTADLTTLLSKRTLAGHWNVIDLRYGXLGGYAAITYHCAVVQPXAPIVRGFVAAWVLIGLNKLAAKVEYDDPLDAAQLSQRVXAWRGLFTGLFAKTEYVEEIHGGGTPFCAMMGGGRR

SEQ ID NO: 11567 - protein, 407 aa, Capsella bursa-pastoris
YQGVYPVKGNQDRFVVEDIVKFGSSFRFGLEAGSKPEILLAMSCLCKGNPDAFLVCNGFKDAEYISLALLGRKLALNTVIVLEQEEELDLVIELSQKMNVRPVIGLRAKLRTKHSGHFGSTSGEKGKFGLTTTQIVRVVRKLSQSGMLDRLQLLHFHIGSQIPSTSLLSDGVAEAAQLYCELVRLGAHMKVIDIGGGLGIDYDGSKSGESDLSVAYSLEEYAEAVVASVRFVCDRSSVKHPVICSESGRAIVSHHSVLIFEAVSADKPMVHQATPDDIQFLLEGDEEARANYEDLYAAVMRGDHESCLLYVDQLKQRCVEGFKEGVLSIEQLASVDGLCEWVLKAIGASDPVHTYNINLSVFTSIPDLWGIDQLFPIVPIHKLDQRPGTRAILSDLTCDSDGKINKF

SEQ ID NO: 11568 - protein, 303 aa, Zea mays
YFPAPRIASAVLVCWPRFRSIPDPPSGRASTDFIIHSPAEPICFVCRSIRRSCEFNPRVSMSSYSPPPPPPRDQSMDTEAPNAPITRERRLNPDLQEQLPKPYLARALEAVDPSHPQGTKGRDPRGMSVLQQHAAFFDRNGDGVIYPWETFQGLRAIGCGLTVSFAFSILINLFLSYPTQPGWLPSPLLSIRIDNIHKGKHGSDSETYDTEGRFDPSKFDAIFSKYGRTHPNAITRDELSSMLQGNRNTYDFLGWLAAAGEWLLLYSLAKDKDGLLQRETVRGLFDGSLFERLEDDNNKKKSS

SEQ ID NO: 11569 - protein, 303 aa, Brassica napus
  unsure (1)..(303): unsure at all Xaa locations
MVFVKPSKSNAYFKRYQVKFRRRRDGKTDYRARIRLINQDKNKYNTPKYRFVVRFTNKDIVAQIVSASIAGDIVKASAYAHELPQYGLTVGLTNYAAAYCTGLLLARRVLKMLEMDEEYEGNLEATGEDFSVEPTESRRPFRALLDVGLIRTTTGNRVFGALKGALDGGLDIPHSDKRFAGFNKENKQLDAEIHRNYIYGGXHVSNYMKMLNEDEPEKFQTHFSQYLKKGVDAESMEELYKKVHAAIRADPNPKKTEKPAPKTHKRYNLKKLTYEERKTKLIERVKALNGAAGGDDEDEDAQE

SEQ ID NO: 11570 - protein, 141 aa, Zea mays
PLQAGDMVEGAYPVLERNGKECAPGAVLRLSVQYVPVARLTMYHHGVTPGPDFAGVPRTYFPLRRGGKVTLYQDAHVPDGTLPEVRLGNGDCYRHGQCWRDVYDAICQARRLIYITGWSVFHTIHWVSVSLTALLGSMIKR

SEQ ID NO: 11571 - protein, 105 aa, Zea mays
MEHGSLTDSTSSTFSIMYEDHTLANSARFVLNQELCSSKPPTNNCYRMMATKDDAQRMKQAAKYPRVAFCGYTIPHPSEKKVNIRLQTTGDAAKDVLKDALQNLM

SEQ ID NO: 11572 - protein, 52 aa, Glycine max
MGSFLEILCAVLIPPVGVFLRFGCGLEFWLSLLLTFFGFIPGMVYAIWVLTK

SEQ ID NO: 11573 - protein, 145 aa, Triticum aestivum
  unsure (1)..(145): unsure at all Xaa locations
MAPAVMASSATTVAPFQGLKSTAGLPVSRRSGSAGLSSVSNGGRIRCMQVWPIEGIKKFETLSYLPPLSTEALLKQVDYLIRSKWVPCLXFNKVGFVFRXEHNNSPRATKNSILDKCGKLPNVRGATERKRKAQTKGWKAKKRYP

SEQ ID NO: 11574 - protein, 308 aa, Hyoscyamus niger
MEEQGNNESAYISSILPGWFSEISPLWPGEAHSLKVEKILFQGKSDYQNVVVFQSSTYGKVLVLDGVIQLTERDECAYQEMITHLPLCSIPNPKKVLVIGGGDGGVLREVSRHSSVEQIDICEIDKMVIDVSKQFFPNVAIGYEDPRVKLHVGDGVAFLKNVPEGTYDAVIVDSSDPIGPAQELFEKPFFESVARALCPGGVVCTQAESIWLHMHIIEDIVSNCRQIFKGSVNYAWTTVPTYPSGVIGFMLCSTEGPAVDFKNPINPIDADDSHTKTRGPLKFYNSEIHSASFCLPSFAKRVIESNAK

SEQ ID NO: 11575 - protein, 223 aa, Thermus thermophilus HB27
MELYLDTASLEEIREIAAWGVLSGVTTNPTLVAKVFAAKGEALTEEAFAAHLRAICETVGGPVSAEVTALEAEAMVAEGRRLAAIHPQIVVKLPTTEEGLKACKRLSAEGIRVNMTLIFSANQALLAARAGASYVSPFLGRVDDISWDGGELLREIVEMIQVQDLPVKVIAASIRHPRHVTEAALLGADIATMPHAVFKQLLKHPLTDIGLKRFLEDWEKVKP

SEQ ID NO: 11576 - protein, 72 aa, Brassica napus
  unsure (1)..(72): unsure at all Xaa locations
SDFTAFTKDQERLISMADDAGVDYLEGQLFMSNGVVYTSFFSQSNQSKIADXVKSHGIIYVLEVXKVYDDPT

SEQ ID NO: 11577 - protein, 165 aa, Triticum aestivum
MYSLRLATSGSTALGFTLGRFGGKTGGGAAAGGLAAPAAAAHVGRRSVSATSNSAAPVPGDQGVGMDPGKQQQQHKPHAPAGEQQGEDVHKTTTAHGDVMTHSFGEGYSTRSDEEGFGGVYGQNDPVLNPGTEVHPDHPDYDKSQGSEVKEKEKARHLKDDKHAT

SEQ ID NO: 11578 - protein, 438 aa, Treponema denticola ATCC 35405
MKKTDFSISTLGECKIQSPIMLSETHGDLIANYVTDNEFIRYNLDASLGETGEPLTHADIIEKAGPRQKIYFSPNYVHAAIATCGGLCPGINDVIRAIVRCLWTRYGVRRISGIKFGYKGFISEYGFSPVPLTPEAVNGIHKTGGSFLGTSRGGGTRVTEIVDGIEQMNINMVFFIGGDGTQKGALEVSREIERRKLKISVIGIPKTIDNDLSFIQKSFGFDTAIAKATESVAAANMEASSQINGIGLVKLMGRESGFIATHTAIACHEAHFVLIPEVRFELGGENGFLKLLEKKLIENGYALIVAAEGAGQHLMNIEEETDASGNKKLADIGLFLKKEITEYFDKIGMHINLKYIDPSYQIRSSIAAPIDSVYCERLGNNAVHAAMAGKTRTLIGLVNNKFVHLPIEQVVSERKYVNPESSLWRDALDATGQPTTMI

SEQ ID NO: 11579 - protein, 170 aa, Zea mays
MAPTVMMASSATAVAPFQGLKSAASLPVARRSSRSLGNVSNGGRIRCMQVWPAYGNKKFETLSYLPPLSTDDLLKQVDYLLRNGWIPCLEFSKVGFVYRENSTSPCYYDGRYWTMWKLPMFGCNDATQVYKELQEAIKSYPDAFHRVIGFDNIKQTQCVSFIAYKPPGSD

SEQ ID NO: 11580 - protein, 511 aa, Gossypium hirsutum
MMAVLFVYLGFMVFGIIVLRFLYRFIDNNGLPRNWPFVGMIPTLLLNIHRPHDKVAQVLRRSNGTFFYRGLWFTNTSFLATSDPENVRYILSSNSSVYLKGPEWLKQFDIFGEALFNSDGEAWKCHRRVFHAFLNHPQYRQSLSKVLHQRIEEALVKVLEYVSGREMVVNLQDLLAGHAFDIGCITGVGFDPGLLSIEFPENRFQKAMSDTLEAAFYRYVVPDSLWKLQSWPQIGKGKKRSDAWKALDDLLTQFISTQRHKSTKSVASSGSNEEHDFNFLNCYLTGHEITGPTPKESLIRDNLIHFLFASDGTYSLTLTWFFYLISKAPVVENKIREEIKRHLSMKQVEGSLQIPSNYDELSKLTYLHAALCETLRLYPPIPFDFRTCTKQEYLPSGHRVDQNTRIIIGIHAMGRMESLWGEDCYAFKPERWIGEDGKIKRESPTKFSAFLAGPRICPGKEVSFLLMKATATAIIHNYNVHVVEGQNIGPKNSVVYQMKKGLMVRIKKRWS

SEQ ID NO: 11581 - protein, 316 aa, Coffea arabica
MADAVNSNSKEEAAQLPDGVSSVIPGWFSEISPMWPGEAHSLKVEKILFQGKSDYQNVMVFQSSTYGKVLVLDGVIQLTERDECAYQEMIAHLPLCSIPSPKKVLVIGGGDGGVLREVARHLSVEQIDICEIDKMVVDVSKQFFPDVAVGFEDPRVVLHIGDGVAFLKAVPEGTYDAIIVDSSDPIGPAQELFEKPFFESVAKALRPGGVVCTQAESIWLHMHIIEDIVANCRQIFKGSVNYAWTTVPTYPSGVIGFMLCSTEGPPVDFKHPINPIDANDGRSKTMKPLKFYNSEIHSAAFCLPSFAKKVIDSKAN

SEQ ID NO: 11582 - protein, 314 aa, Nicotiana sylvestris
MEAANHNNNGCTNESPYISSVLPGWFSEISPLWPGEAHSLKVEKILFQGKSDYQNVMVFQSSTYGKVLVLDGVIQLTERDECAYQEMIAHLPLCSIPNPKKVLVIGGGDGGVLREVSRHSSVEQIDICEIDKMVVEVSKQFFPDVAVGYEDPRVNLHIGDGVAFLKNVAAGTYDAVIVDSSDPIGPAQELFEKPFFESIARALRPGGVVSTQAESIWLHMHIIEEIVANCRQIFKGSVNYAWTTVPTYPSGMIGFMLCSTEGPAVDFKNPINPIDDDASHNKTLGPMKFYNSELHKASFCLPSFAKRVIESKGK

SEQ ID NO: 11583 - protein, 313 aa, Psychrobacter sp. 273-4
MSALQQLRTMTTIVADTGDLAAIERLKPIDATTNPSLITKALIHPDNEAVLSETMSRHRNDIDAVIDELTIQIGCNILSLIEGRVSTEVDARLSYDTQATIDKALAFMEAYQKSGIDSERVLIKMAATWQGIEAARYLETQGIHCNLTLLFGQHQAIACADAGVTLISPFVGRILDWQKRQQNRQNIPVSDDMGVQSVKLIYQYYKQHGYKTQVMGASFRSTEQILALAGCDLLTIAPNLIDELAAMDIEVTRQLSESMSMDMTDMTRVSLSAEEFSHAYQQDTITQDLLPKGIDGFISARDELAHMLASMRS

SEQ ID NO: 11584 - protein, 249 aa, Triticum aestivum
  unsure (1)..(249): unsure at all Xaa locations
MKTFLIFALLAVAATSAIAQIENSHIPGLEKPSQQQPLPLQQTLSHHQQQQPVQQQPQPFPQQQPCSQQQQPPLSQQQQPFPQQPQQPFPQTQQPQQPFPQQPQQPFPQTQQPQQPFPQLQQPQQPFPQPQQQLPQPQQPQQSFPQQQRPFIQPSLQQQLNPCKNILLQQCKPASLXVSSLWSIIWPQSDCQVXMRQQCCQQLAQXPQQSNSQASIRLDSIIXQQXQQQQQQQGCNXANGGARTIPKVL

SEQ ID NO: 11585 - protein, 219 aa, Streptococcus agalactiae
AIKQQTIFDIDNAKTEVEIDNLVHDAFSKMNATVAKFQKGLETNTPETPDTPKIPELPQAPDTPQAPDTPHVPESPKAPEAPRVPESPKTPEAPHVPESPKAPEAPRVPESPKTPEAPHVPESPKAPEAPRVPESPKTPEAPHVPEAPKTPEAPKIPEPPKTPDVPKLPDAPKLPDGLNKVGQAVFTSTDGNTKVTVVFDKPTDADKLHLKEVTTKELA

SEQ ID NO: 11586 - protein, 219 aa, Streptococcus agalactiae
AIKQQTIFDIDNAKTEVEIDNLVHDAFSKMNATVAKFQKGLETNTPETPDTPKIPELPQAPDTPQAPDTPHVPESPKAPEAPRVPESPKTPEAPHVPESPKAPEAPRVPESPKTPEAPHVPESPKTPEAPKIPEPPKTPDVPKLPDVPKLPDVPKLPDVPKLPDVPKLPDAPKLPDGLNKVGQAVFTSTDGNTKVTVVFDKPTDADKLHLKEVTTKELA

SEQ ID NO: 11587 - protein, 356 aa, Magnaporthe grisea 70-15
MSRANPPSNSSGSRKISFNVSEQYDIQDVVGEGAYGVVCSAIHKPSGQKVAIKKITPFDHSMFCLRTLREMKLLRYFNHENIISILDIQKPRSYETFNEVYLIQELMETDMHRVIRTQDLSDDHCQYFIYQTLRALKAMHSANVLHRDLKPSNLLLNANCDLKVCDFGLARSAASQEDNSGFMTEYVATRWYRAPEIMLTFKEYTKAIDVWSVGCILAEMLSGKPLFPGKDYHHQLTLILDVLGTPTMEDYYGIKSRRAREYIRSLPFKKKVPFRTLFPKTSDLALDLLEKLLAFNPVKRITVEEALKHPYLEPYHDPDDEPTAPPIPEEFFDFDKHKDNLSKEQLKQFIYQEIMR

SEQ ID NO: 11588 - protein, 237 aa, Streptococcus agalactiae
AIKQQTIFDIDNAKTEVEIDNLVHDAFSKMNATVAKFQKGLETNTPETPDTPKIPELPQAPDTPQAPDTPHVPESPKAPEAPRVPESPKTPEAPHVPESPKAPEAPRVPESPKTPEAPHVPESPKTPEAPHVPESPKAPEAPRVPESPKTPEAPHVPESPKTPEAPKIPEPPKTPDVPKLPDVPKLPDAPKLPDGLNKVGQAVFTSTDGNTKVTVVFDKPTDADKLHLKEVTTKELA

SEQ ID NO: 11589 - protein, 181 aa, Xanthomonas campestris pv. campestris str. ATCC 33913
MSQSIHDIPVTDINGGATSLAAHRGKVLLVVNVASKCGLTPQYEGLEALYRDKQAQGLEVLGFPANDFNGQEPGSEAEIAQFCQLTYDVTFPLFSKIAVTGAEIHPLYQALTSAQPQATGDGPMREKLAGYGIAANPAPGVLWNFEKFLIGRDGQVIERFAPDVAADDVRLRQAVDAALAH

SEQ ID NO: 11590 - protein, 120 aa, Gossypium hirsutum
MASSMSLKLACVVVLCMVVGAPLAQGAVTCGQVTNSLAPCINYLRGSGAGAVPPGCCSGIKSLNSAAQTTPDRQAACRCIKSAAAGITGINFGLASGLPGKCGVNIPYKISPSTDCNSVK

SEQ ID NO: 11591 - protein, 249 aa, Streptococcus agalactiae
AIKQQTIFDIDNAKTEVEIDNLVHDAFSKMNATVAKFQKGLETNTPETPDTPKIPELPQAPDTPQAPDTPHVPESPKAPEAPRVPESPKAPEAPRVPESPKTPEAPHVPESPKAPEAPRVPESPKAPEAPRVPESPKTPEAPHVPESPKAPEAPRVPESPKTPEAPHVPESPKTPEAPKIPEPPKTPDVPKLPDVPKLPDAPKLPDGLNKVGQAVFTSTDGNTKVTVVFDKPTDADKLHLKEVTTKELA

SEQ ID NO: 11592 - protein, 193 aa, Nicotiana tabacum
MAFAGTTQKCMACDKTVYLVDKLTADNRIYHKACFRCHHCKATLKLGNSNSFEGVLYCRPHLIGLFKQTGSLDKSFEGTPKIVRPQKPIDSEKPQVAKVTSMFGGTREKCFGCKKTVYPTEKVSVNGTPYHKSCFKCSHGGCVISPSNYIAHEGRLYCKHHHIQLIKEKGNLSKLEGDHEMNSTTTTEVTAES

SEQ ID NO: 11593 - protein, 202 aa, Triticum aestivum
MLLPTRRLPAAPSRPSVHPYISPARPSLRFRPQYGRAATARATSATPPVFGDTLLGLYEKERLGLSRYADEESREDVFWETLDADLQYWTRSLRPGQWYPGHIAKTEKELKGQLKLMDVAIEVRDARIPLATTHPKMDSWLGNRRRIIVMNREDMVSADDRNAWATYFSSQGIKVIYSNGQLGMGTMKLGRMAKSAASRGIY

SEQ ID NO: 11594 - protein, 1182 aa, Cryptococcus neoformans var. grubii
MFVTRPPSSSVDHRGSLLDGHTNHTNTPGSSRDDVPSSDSTSTAFHKFKNSSRFSPHYLNIPPGLAFKSYLEKWGPEQVIGFLAIHGCEHHSGIFIKNSIDGKLLLDLDMGILTSLGITKVGERIRLMAGIKCLRQRVAHEAEKHNIPSAHLCNGSLEMDRVKVIIHPKLSASLYVHRHGPFDSGPITARRCPLTPSSSADPEGDPSPMQRSQEVMKHSFITRSSRRQVIPPLPPGQIHNHGIDNSPMPSLRHIPLRSGVSYSDIDVKGMPPLVTQSTNSVFNHTFAVTGSHDTTSCLGGHLRRPDYFRSTNDTFQTCTKRGDNTISELPQRNQESSPSMWKQSGVICEDKAMRNGSLFAPTSHKPFAISITGDNVMEYPHNLPIKNGLPLRSFQSPDKSADDDRLNINPSAPSLDDLRRQLVKFVNAEDGTTRTVNVMKTTSGVEVLERALRKFGKTGTGRALLLDDESHNGGKHEGPLCIDGWGVFAENLQGEEMGPMSEEDLLDICASLRNGAAMQRDALILRQTSKSQKRKDMRFYLGSMPVLPTPVNLPISFSSSHSGQFEQNSALQYTAQHQPLRSKNRSRASMMSIMSGLGVSHPDIKQPTHDSLQSPASVTMPSSKKKSMYNFFGHRPPSELISSHLTDYFPSAKKRDVAKARGSMLRLNIAHSAERNPRSVENLGMIEADDVPFSSTEQSLTEQRDHYFDSSTCQPADTSSPGHVDHNITDPAGNSEGNYRLPYDQKVLPTPITQELHSANSVNPILRTYPPNLPSTYLSARLTDLHRDSFLSQLQPLQHSSSLSSAQPFSSHRRTVDEITAEMQHRQTSLSCDRPTSTIDSDISGPPCNSEISLDHTSEASGISESSSEYCDDHSSVSSEDSEDNSAAHTRAFTTKRNIKWIKGALIGAGSFGSVFLGMDAQSGLLMAVKQVELPRGIAKMEARRRDMLSALEREIELLKDLQHDNIVQYLDSSMDANHLNIFLEYVPGGSVAALLNNYGAFEEALAGNFVRQILTGLNYLHERDIVHRDIKGANILVDNKGGIKISDFGISKKVENSLLNGLHPNRPSLQGSVFWMAPEVVKQTSYTSKADIWSVGCLVVEMLTGTHPWARLTQMQAIFQIGSMGQPEIPSDISVHAADFLSRAFALDYRMRPSAASLLKHAFMVHDGNGGNDEPIQNTYA

SEQ ID NO: 11595 - protein, 249 aa, Streptococcus agalactiae
AIKQQTIFDIDNAKTEVEIDNLVHDAFSKMNATVAKFQKGLETNTPETPDTPKIPELPQAPDTPQAPDTPHVPESPKAPEAPRVPESPKTPDTPHVPESPKAPEAPRVPESPKTPDTPHVPESPKAPEAPRVPESPKTPEAPHVPESPKAPEAPRVPESPKTPEAPHVPESPKTPEAPKIPEPPKTPDVPKLPDVPKLPDAPKLPDGLNKVGQAVFTSTDGNTKVTVVFDKPTDADKLHLKEVTTKELA

SEQ ID NO: 11596 - protein, 457 aa, Magnaporthe grisea 70-15
MGSPSPGTATSPPEDGDTADDYVNPLDQSPRWALATRAYAIRSGASLGFGISNAWAPPELAPVKVIWLDALLGDWKAKRAIRVDVWEPPSQPNTDKPDFPSTSQSSASDLLALAAPNVVVKTPTDEIDDNASIKSGCSSALSSSGRSSSSKLGTPKRPRIYKVASNLSSRSSRSIASIRSRLSRSNTASGLSLDSIPKRPVVINFHGGGFVVGEGTDDSRWCSAVAKSLNAVVFSVSYRLAPGYPFPNAVEDCASAIVQICSQDMASQYAIDTSRVILSGFSAGGNLALASWVALQDPARWGYESVLPSPPLEMAGLALFYPLLDWTIARDTKRQRCERPDLTLPKGLTDLFDASYIYPPLQSSKRDDPRLSPGLMSDRMLQQLPPVHFCLCEYDMLLAEGLTFTERLKSHGRIVETRVVKGEKHAWDKPPLWAPKENAAVEYEAAIESLKTWVGLD

SEQ ID NO: 11597 - protein, 193 aa, Nicotiana tabacum
MAFAGTTQKCMACDKTVYLVDKFTADNRIYHKACFRCHHCKGTLKLGNYNSFEGVLYCRPHFDQLFKQTGSLDKSFEGTPKIVKPQKPIDSEKPQVAKVTSMFGGTREKCFGCKKTVYPTEKVSVNGTPYHKSCFKCSHGGCVISPSNYIAHEGRLYCKHHHIQLIKEKGNLSKLEGDHEMNSTTTTEVTAES

SEQ ID NO: 11598 - protein, 292 aa, Zea mays
MAIATESRGSEDRASAHANEEKRWVLSDFEVGKPLGRGKFGHVYLAREKRSNQIVALKVLFKSQLKQSQVEHQLRREVEIQSHLRHPNILRLYGYFYDQTRVYLILEYAAKGELYKELTRCKHFSERRSATYIASLARALIYLHGKHVIHRDIKPENLLVGAQGEIKIADFGWSVHTFNRRRTMCGTLDYLPPEMVEKTEHDYHVDIWSLGILCYEFLYGVPPFEAKEHSETYRRIVKVDLKFPLKPFVSPAAKDLISQMLVKNSAQRLPLHKVLEHPWIVQNADPSGVCRG

SEQ ID NO: 11599 - protein, 239 aa, Arabidopsis thaliana
MSLIEDCLRSYRFIAIDTEFPSTLRETTQHATDEERYMDMSFSVDRAKLIQLGLTLFDINGRIGGTWEINFSDFGVDDARNEKSIEFLRRNGLDLRKIREEGIRIEGFFSEMFWMLKKTRRNITWVTFHGSYDIAYLLKGFTGEALPVTSERFSKAVARVLGSVYDLKVMAGRCEGLSSRLGLETLAHEFGLNRVGTAHHAGSNNELTAMVFAKVLSPFPLFLRFGSLELRTIESEAIV

SEQ ID NO: 11600 - protein, 447 aa, Glycine max
  unsure (1)..(447): unsure at all Xaa locations
SVIGYSVVILIMERYKILRELGDGSCGHVYKARDXEHYEIVAVKRLKRKFYFWEEYTNLREVMILRKMNHSNIIKLKEVVRENNELFFIFEYMDCNLYQLIKEREKPFSEEEIRCFMRQVLQGLSHMHKKGFFHRDLKPENMLVTNDVLKIADFGLAREVSSMPPYTQYVSTRWYRAPEVLLRAPCYTPAVDMWAVGAILAELFFDSLEYPGESEIDQLYKIYGILGMPDSTAFHHCYTPAVDMWAVGAILVVPPVKLSNIIPNASLEALDXITQLLHWDPSRRPDADQSLQHPFFHVDAWVPCPPSDPLELKLSSKRAKPNLELKLQDFGPDPDDCFLGLTLGVKPSVSNSDVVQNVSQGVRENVLFCSDFNDHSDQSVFWTLLSPDQNGIHNSAETSLSLSFSPVQHPPIGVPQSVGFSFQPLQPNILTSPFLALSSPFQRGHCL

SEQ ID NO: 11601 - protein, 407 aa, Arabidopsis arenosa
YQGVYPVKGNQDRFVVEDIVKFGSSFRFGLEAGSKPEILLAMSCLCKGSPDAFLVCNGFKDAEYISLALLGRKLALNTVIVLEQEEELDLVIELSQKMNVRPVIGLRAKLRTKHSGHFGSTSGEKGKFGLTTTQIVRVVRKLSQSGMLDCLQLLHFHIGSQIPSTSLLSDGVAEAAQLYCELVRLGAHMKVIDIGGGLGIDYDGSKSGESDLSVAYSLEEYAEAVVASVRFVCDRSSVKHPVICSESGRAIVSHHSVLIFEAVSADKPMVHQATPDDIQFLLEGNEEARANYEDLYAAVMRGDHESCLLYVDQLKQRCVEGFKEGVLSIEQLASVDGLCEWVLKAIGASDPVHTYNINLSVFTSIPDLWGIDQLFPIVPIHKLDQRPGARGILSDLTCDSDGKINKF

SEQ ID NO: 11602 - protein, 424 aa, Staphylococcus aureus subsp. aureus COL
MKLIKNGKVLQNGELQQADILIDGKVIKQIAPAIEPSNGVDIIDAKGHFVSPGFVDVHVHLREPGGEYKETIETGTKAAARGGFTTVCPMPNTRPVPDSVEHFEALQKLIDDNAQVRVLPYASITTRQLGKELVDFPALVKEGAFAFTDDGVGVQTASMMYEGMIEAAKVNKAIVAHCEDNSLIYGGAMHEGKRSKELGIPGIPNICESVQIARDVLLAEAAGCHYHVCHVSTKESVRVIRDAKRAGIHVTAEVTPHHLLLTEDDIPGNNAIYKMNPPLRSTEDREALLEGLLDGTIDCIATDHAPHARDEKAQPMEKAPFGIVGSETAFPLLYTHFVKNGDWTLQQLVDYLTIKPCETFNLEYGTLKENGYADLTIIDLDSEQEIKGEDFLSKADNTPFIGYKVYGNPILTMVEGEVKFEGDK

SEQ ID NO: 11603 - protein, 302 aa, Triticum aestivum
  unsure (1)..(302): unsure at all Xaa locations
LGGSRPRSALKLVGATLAEHTYLFLGAGEAGTGIAELIALEMSRQTKTPIDECRKKIWLVDSKGLIVSARKESLQHFKKPWAHEHEHVGNLLDAVNAIKPTVLIGTSGKGQTFTQEVVEAISSFNEMPIILALSNPTSQAECTAEQAYTWSKGRAVFATGSPFDPVQYNGKIHVPGQANNAYIFPGFGLGVVMSGAIRVHDDMLLAASEALAQQVTQENFDKGLIYPPFSNIRKISAHIAANVAAKAYELGXLASRRPRPKDLVKYAESCMYSPIYRNLQVNPAFIRLCTETVCPTTCLQNP

SEQ ID NO: 11604 - protein, 498 aa, Magnetospirillum magnetotacticum MS-1
MCGIAATIGLSDATAFTSLFGAIGHRGPDESGIRESGDIRIGMHRLAIVGRMGDSVPLIGADGLVLAFNGEIYNHQALRADFPDYPFAGQSDAEVLFPLLKRHGLGGLDRLRGMFAFVLTDMESGEFLAVRDPFGIKPLYYAETGGGFAFASEMKAFAAMGITPRFLPPGHLLTRHGLRRWYRVPGRFRLSRRPNLRALLERAVASHLPPEGPCGVFLSGGLDSSLVAALAARSRPDMVAYSVVLPGSPDEEPAALMAAHLGIRHKVLRATADDIRAALPEVIGALESFNPIMVRNAVPLYLLSKMAAKDCKVVLGGDGADELFAGYDYLSRVPRRFWPQAMDYGFSNLHRTELQRVDRMTMAHGLELRVPFLDREVAEAAVNLPLSAKFGIKDGTPMPKLALREAAEGLLPPSIQWRRKLPLADGSGFGGLDLGAGRDKADPVPGWDVGDEDAVAFFPLWRVRFPLARPDSAIWRDCGRYHDFEECHGRPLLELFRR

SEQ ID NO: 11605 - protein, 487 aa, Chlamydomonas reinhardtii
MPLAELWRLTKLVPLACTVLLLSVRALAVDSGGLNDSADNSSRSLLQESGQASGTSQPYTYSSSDFVLLNGFLIFFMQIGFVSAESGQGRAKNVRNILLKNSVNIMLCAICWWAVGYAFAYGNSGGGFIGTSRFFSDGESFGSKPWFFTWTFCLSCVTIASGCLAERTHLFVYPVYTAVVSIAVHPVIAHWVWAPDSWLNSMTGSPCRFLDFAGGAVVHTVGGLTGLIGAMLCGPRLGRFEDGVGKDIPGHDVSSVSLGSLMLWFGWYGFNCGSTYIYMAQGGSEASAAVSRVALNMTLCASVAGMTSLVVSSIQTGTFDLAVCCNGLMAGLSASTSNVGFLTPWAACITGALAGLLYVGISRLLVRMGVDDPLDSSAIHCGSGILGVLVSGFLARPSYVMQMVGCNCGGVVYATNGGMQLGMQLLGLSCSMVWTAMWALLTFGILKKLQLLRVDQQTELAGIDNMEHGGPAYPEFLQRVQSTRPGY

SEQ ID NO: 11606 - protein, 407 aa, Stanleya pinnata
YQGVYPVKGNQDRFVVEDIVRFGSPFRFGLEAGSKPEILLAMSCLCKGNPDAFLVCNGFKDAEYISLALLGRKLALNTVIVLEQEEELDLVIDLSQKMNVRPVIGLRAKLRTKHSGHFGSTSGEKGKFGLTTTQIVRVMRKLSQSGMLDCLQLLHFHIGSQIPSTSLLSDGVAEAAQLYCELVRLGAHMKVIDIGGGLGIDYDGSKSGESDLSVAYTLEEYAEAVVASVRFVCDRRSVKHPVICSESGRAIVSHHSVLIFEAVSAVKPMAHQANPDDIQFLLEGNEEARANYEDLYAAVMRGDHESCLLYVDQLKQRCVEGFKDGVLSIEQLASVDGLCEWVLKAIGASDPVHTYNINLSVFTSIPDLWGIEQLFPIVPIHKLDQRPGTRGILSDLTCDSDGKIDKF

SEQ ID NO: 11607 - protein, 472 aa, Escherichia coli O157:H7
MTTHLVWFRQDLRLHDNLALAAACRNSSARLLALYIATPRQWAAHNMSPRQAELINAQLNGLQIALAEKGIPLLFREVDDFAASVEIVKQVCAENSVTHLFYNYQYEVNERARDVQVERTLRNVVCEGFDDSVILPPGAVMTGNHEMYKVFTPFKNAWLKRLREGMPECVAAPKVRSSGSIKPAPSITLNYPRQSFDTAHFPVEEKAAIAQLRQFCQNGAGEYEQQRDFPAVEGTSRLSASLATGGLSPRQCLHRLLAEQPQALDGGAGSVWLNELIWREFYRHLMTYYPSLCKHCPFIAWTDRVQWQSNPAHLQAWQEGKTGYPIVDAAMRQLNSTGWMHNRLRMITASFLVKDLLIDWREGERYFMSQLIDGDLAANNGGWQWAASTGTDAAPYFRIFNPTTQGEKFDREGEFIRQWLPELRNVPGKSVHEPWKWAEKAGVKLDYPQPIVEHKEARVQTLAAYEAARKGK

SEQ ID NO: 11608 - protein, 161 aa, Thermoplasma acidophilum
MNRSYSDQAEVDCMEVKVEGFGKGSQIPVEYTCDGEDRMPAIAVEGFPSGTKSLALIVDDPDAPSGLFTHCIIYNIPTSVKVIDSSILKQTGVLSGVNDFGNKGYGGPCPPPGKPHRYYFKVLALDTTLTKAGMKRKDFDNAVRGHVLGQAEYMGTYLRKH

SEQ ID NO: 11609 - protein, 143 aa, Nitrosomonas europaea ATCC 19718
MCHTCDGKDFSPELAWTGVPENTKSLVLIVDDPDAPDPQAPKMTWVHWILYNIPPATRKLPERVTVAELPSGTLEGVNDWERTGYGGPCPPIGTHRYFHKLYALDTLLPDLNQPTKAILEKAMQGHIIARTELIGLYHRSDNV

SEQ ID NO: 11610 - protein, 416 aa, Escherichia coli
MESKVVVPAQGKKITLQNGKLNVPENPIIPYIEGDGIGVDVTPAMLKVVDAAVEKAYKGERKISWMEIYTGEKSTQVYGQDVWLPAETLDLIREYRVAIKGPLTTPVGGGIRELNVALRQELDLYICLRPVRYYQGTPSPVKHPELTDMVIFRENSEDIYAGIEWKADSADAEKVIKFLREEMGVKKIRFPEHCGIGIKPCSEEGTKRLVRAAIEYAIANDRDSVTLVHKGNIMKFTEGAFKDWGYQLAREEFGGELIDGGPWLKVKNPNTGKEIVIKDVIADAFLQQILLRPAEYDVIACMNLNGDYISDALAAQVGGIGIAPGANIGDECALFEATHGTAPKYAGQDKVNPGSIILSAEMMLRHMGWTEAADLIVKGMEGAINAKTVTYDFERLMDGAKLLKCSEFGDAIIENM

SEQ ID NO: 11611 - protein, 238 aa, Oryza sativa (japonica cultivar-group)
MPSRTAPFISRLRLLRTAAALSPFSSSAPPRHSPRILRAIPVGAPHPPRVSAAVSPLVRPVAAGFALFSMATAASSAASVHDFTVKDASGKDVDLSTFKGKVLLIVNVASQCGLTNSNYTELSQLYEKYKDQGFEILAFPCNQFGGQEPGTNEEIVQFACTRFKAEYPIFDKVDVNGDNTAPIYKFLKSSKGGLFGDNIKWNFSKFLVDKEGRVVERYAPTTSPLSMEKDIKKLLGSS

SEQ ID NO: 11612 - protein, 426 aa, ASPERGILLUS NIDULANS FGSC A4
MLKNVLRRGALRLVRQRASYATSALTPQQKQIVKATIPALEQHGVTITTLFYKEMLERHPELNNIFNSSHQATGVQPAALAHAVWAYASNIDHPEALATAVSRIGHKHASLGVRSEHYPIVGEHLLRAIKKVLGDAVTPPVADAWTAAYQQLADIFISFEDDLYKQATQTPGGWTGWRKFVIADKVHESEEIISFQLVPQDNGRLPTYKPGQFVSVRCFVPELGVYQPRQYSLSDIPNQRYFQISVKKEFASGARPAGRISNVLHESLPKGSEVEISMPFGDFVLDTNATTPVVLMSGGVGLTPMMSMLKTVTNNSKSRPAVFVHAVRNGRVHAMKETLANIMTDNPQVKRAIFYEQVEEGDKQGVDYDYVGRVDVSKIKDLVFLPDADYYICGPSPFMKAQSEALETLGVRPDRIHMEVFGSPTP

SEQ ID NO: 11613 - protein, 127 aa, Streptomyces avermitilis MA-4680
MPTGKVKWFNSEKGFGFLSRDDGGDVFVHSSVLPAGVEALKPGQRVEFGVVAGQRGDQALSVVLLDPTPSVAAAQRRKPDELASIVQDLTTLLENITPMLEKGRYPEKTSGKKIAGLLRAVADQLDV

SEQ ID NO: 11614 - protein, 425 aa, Vibrio vulnificus CMCP6
MSDDNSQQMTPEEVLRQQALDYHALPTAGKIAVALTKPAETAKDLALAYSPGVAEPVREIAQNPDNVYKYTSKGNMVAVISNGTAILGLGNLGPLASKPVMEGKALLFKRFAGLDSIDIEVKHRTIDEFVDTVANIADTFGGINLEDIKAPDCFEIEKRLIERCDVPVFHDDQHGTAIVTAAGMLNAIELQGKKLNECIIVCLGAGAAAVACMELLIKCGAMREKIYMLDRKGVIHTRRDDLNEYKQLFANNTDKRTLEDVISGADLFLGVSGPNLMPAEALKLMADKPVVFACSNPDPEIKPELAHEVRSDLIMGTGRSDYPNQVNNVLCFPFIFRGALDVRASEINDEMKLAAVEAIRQLAKEPVPEAVLKAAGVESLSFGPQYIIPKPMDSRLLPRVAKAVAQAAVDTGVARIPMPENYMAE

SEQ ID NO: 11615 - protein, 513 aa, Hordeum vulgare
MDGNNRGGGHSEVLKNYNLGKTLGLGTFGDVKVAERNVTGQRVAIKILNRRKMETMEMEEKGNREIKIMRLFIDFIHPHIIRVYEVIETPKDIFVVMEYCNNGELLDYIIENGRLQEDEARRIFQQILAGVEYCHRIMVVHRDLKPENLLLDSRYNVKLADFGLSNVMRDGHFLKTSCGSLNYAAPEIISSKLYAGPEVDVWSCGVVLYALLCGSVPFDDDNIPSLFRKIKGGTYILPSYLSDSARDLIPKLLNIDPMKRITFHEIRVHPWFKNHLPCYLAVPPPYKEQQAKMIDEDILREVVNLGYDKDHVCESLWNRLQNEETVAYYLLLDDRFRSTSGYLGADHQHLMDRSFNEFTLSESASPSTRNYLPGINDSQGGGLRPYYPVQRKWAIGLQSGAHPRDIMIEVLKALKELNVCWKKNGLYNMKCRWCPGFPQVSDMLLDSNHNFVDDSTIMDNGNADGRLPAVVKFEIQLYKTKDNKYLLDIQRVTGPQLLFLEFCGAFLTNLRVL

SEQ ID NO: 11616 - protein, 195 aa, Triticum aestivum
HASAHASAHAFADAWVQLCKHFQFDWPVNHTSLSPDGKLVVIVGDDPNGLLIDANSGKTLHSMKGHHDFSFASAWSPDGRTFATGNQDKTCRIWDARNLSKAVHVLKGNLGAIRSIRFTSDGQFLSMAEPADFVHIFDVKSDYNRRQELDFFGEISGMSFSPDTDALFVGVWDRTYGSLLQFGRLYNNWYHDSML

SEQ ID NO: 11617 - protein, 348 aa, Treponema denticola ATCC 35405
MSIKIRTAAVTGPHKVEILELNTPDLRSGEVLVKVHAVALCTLEQRIFRGEIPMPLPCTGGHEVSGEVVALGDGVNTKKWSAGDRVAVRLLYNCGECHYCHSGHNNLCERAQKKPVRENLLVGPGGLCDYIIVNTSALFPISDELSYEEACLTEPLACCVHSIERANLQLGEDVVVIGGGIMGQYHIMLAKCRGCRVILSEVDPERCKLGKQLGADIVFNPLEHDPVTFIQSLTNGRGADAVFNTTPIPGVVPQAIAMTGKCGRMIQYSSMHPDSPTPVSPQMLHGSEIVLTGAISPDERNFYTANRLLSTGIINCKPLIAKKFPFEEAQKAFEAAIVPGTFRMIITD

SEQ ID NO: 11618 - protein, 296 aa, Spiroplasma kunkelii
MTTNIHWFPGHMAKAIKQIDEQSKLIDLIIEIVDSRIPFSSSNPLVDNLRGLKPKLIILNKKDLADPVAIKAWFKYYQSQQIAVLPLDSKHGNITKLIIEKIYFVLAGKIERNQNRGIKSPKLKVMVIGIPNVGKSTFINALIKRNSTRVGNKPGVTKGQQWLKLNHQIDLVDTPGILWPKINDPQVAINLAFIRSIKEDILPKEEICLAAIKWMHKYYFSLLVKQYHLLPSDNFDVTDEQKLFELLLVMQKNRFHKVDEDNVNNIVTDFLNNLWNNKFGLMSFEFPPGKRTINYE

SEQ ID NO: 11619 - protein, 304 aa, Candida parapsilosis
MSLAGKEFKLSNGNKIPAVAFGTGTKYFKRGHNDLDKQLIGTLELALRSGFRHIDGAEIYGTNKEIGIALKNVGLNRKDVFITDKYNSGNHTYDGKHSKHQNPYNALKADLEDLGLEYVDLYLIHFPYISEKSHGFDLVEAWRYLERAKNEGLARNIGVSNFTIENLKSILDANTDSIPVVNQIEFSAYLQDQTPGIVEYSQQQGILIEAYGPLGPITQGRPGPLDKVLSKLSEKYKRNEGQILLRWVLQRGILPITTTSKEERINDVLEIFDFELDKEDEDQITKVGKEKTLRQFSKEYSKYD

SEQ ID NO: 11620 - protein, 250 aa, Capsicum annuum
MGKSYPTVSAEYLKAVDKCKRKLRALIAEKNCAPIMLRLAWHSAGTYDVCSKTGGPFGTMRFRAEQAHGANNGIDIAIRLLEPIREQFPTLSYADFHQLAGVVAVEVTGGPDVPFHPGREDKPEPPVEGRLPDATKGSDHLRDVFVKQMGLSDKDIVALSGGHTLGRCHKERSGFEGPWTTNPLIFDNSYFKELLSGEKEGLLQLPSDKALLSDPAFRPLVEKYAADEDAFFADYAEAHLKLSELGFAEA

SEQ ID NO: 11621 - protein, 494 aa, Treponema denticola ATCC 35405
METLKYVKKEPYQLFIDGKYIPSENGSIVDVINPVNNLPFAKAYRGTKTDCEKAIAAARKAFDEGPYRKMSAKDRSKLLLKAAQILERRAEELAVIETLECGKNYSACRYWEVPMAIDSFEFFAGKARCLDGKVVPSEYGTLNYVTWNPCGVVGEILPWNGPFLMGCQKVNAILAAGNTVVIKPPSWGVLSMILMASIYEEAGFPSGVVNVVTGSGAEVGNCLVESELVDMVSMTGGVETGREIIAHSAKLVKDIALELGGKSPNIFFEDVDIEQAARFAVYGFTNHAGQICVSGTRILVQRRIYEPFIKAMVETAYKLKPGDGFDPSTTINTLISREHANTVWEYIEKGKKQNARLVCGGNPYSEPLLKKGNFIPPTIFADVTPEMEIFQNEIFGPVACITPFDTEEEAISLANATKYGLAGGVFTKDIKRAIRVADRINSGQIYINNYFSKGMIESPGTGWKESGIGIAGIHKYMISKTVFVETVDNVLLPI

SEQ ID NO: 11622 - protein, 307 aa, Candida parapsilosis
MTQSNLLPKTFRTKSGKEISIALGTGTKWKQAQTINDVSTELVDNILLGLKLGFRHIDTAEAYNTQKEVGEALKRTDVPREDIWVTTKYSPGWGSIKAYSKSPSDSIDKALAQLGVDYVDLFLIHSPFFTTEQTHGYTLEQAWEALVEAKKAGKVREIGISNAAIPHLEKLFAASPSPEYYPVVNQIEFHPFLQNQSKNIVRFCQEHGILVEAFSPLAPLARVETNALAETLKRLAEKYKKTEAQVLLRYTLQRGILPVTTSSKESRLKESLNLFDFELTDEEVNEINKIGDANPYRAFFHEQFKDL

SEQ ID NO: 11623 - protein, 117 aa, Triticum aestivum
MERRAARRSSAHHSRMQMPPAPVGQKQHQQTQTQRRGGSKSCQRTPPPPGCFTIQLLMVFLWVAASLAFLPLVLPPLPPPPLSLLLLPVCLLAVLAALAFVPLDAHSNVVGGGSSCL

SEQ ID NO: 11624 - protein, 404 aa, Escherichia coli
GKKITLQNGKLNVPENPIIPYIEGDGIGVDVTPAMLKVVDAAVEKAYKGERKISWMEIYTGEKSTQVYGQDVWLPAETLDLIREYRVAIKGPLTTPVGGGIRSLNVALRQELDLYICLRPVRYYQGTPSPVKHPELTDMVIFRENSEDIYAGIEWKADSADAEKVIKFLREEMGVKKIRFPEHCGIGIKPCSEEGTKRLVRAAIEYAIANDRDSVTLVHKGNIMKFTEGAFKDWGYQLAREEFGGELIDGGPWLKVKNPNTGKEIVIKDVIADAFLQQILLRPAEYDVIACMNLNGDYISDALAAQVGGIGIAPGANIGDECALFEATHGTAPKYAGQDKVNPGSIILSAEMMLRHMGWTEAADLIVKGMEGAINAKTVTYDFERLMDGAKLLKCSEFGDAIIE

SEQ ID NO: 11625 - protein, 377 aa, Cryptococcus neoformans var. grubii H99
MSFRAPNLIRSTVGRRAGQTLNLRSQVIRRRFATEGGPEITKPSAPRSSNTGYIFAGLGVAAVGAAYYFYGTGRTEHDSTNKADTVVREAVATVEAKTGLRRGKDEYQKVYNRIAETLDKEGYDDGSLAPVLLRLAWHASGTYSKADGTGGSNFATMRFKPEAEHSANNGLHVAREHMEKIKQEFPWISYGDLWTLGGVCAIQESGGPTIPWRPGRIDGYAAQVTPDGRLPDATQAQDHLRFIFNRMGFNDQEIVALSGAHAMGRCHPNRSGFDGPWTFSPVTFSNQYFALLRDEPWQWKKWTGPAQFEDKKTKTLMMLPTDMALVKDKSFKKYVDIYADNEEKFFSDFAKAFSKLIELGVPERQWAGEPWTMATSD

SEQ ID NO: 11626 - protein, 404 aa, Pseudomonas aeruginosa UCBPP-PA14
MGPDVVDVRGLTATGHFTFDPGFMSTASCESKITYIDGDKGVLLHRGYPIEQLAEKSDYLETCYLLLNGELPTAAQKEQFVGTIKNHTMVHEQLKTFFNGFRRDAHPMAVMCGVIGALSAFYHDSLDINNPKHREVSAHRLIAKMPTIAAMVYKYSKGEPMMYPRNDLNYAENFLHMMFNTPCETKPISPVLAKAMDRIFILHADHEQNASTSTVRLAGSSGANPFACIASGIAALWGPAHGGANEAVLRMLDEIGDVSNIDKFVEKAKDKNDPFKLMGFGHRVYKNFDPRAKVMKQTCDEVLQELGINDPQLELAMKLEEIARHDPYFVERNLYPNVDFYSGIILKAIGIPTSMFTVIFALARTVGWISHWQEMLSGPYKIGRPRQLYTGHTQRDFTALKDRG

SEQ ID NO: 11627 - protein, 421 aa, Bradyrhizobium japonicum USDA 110
MKTAKRSPIWHPFTQHALQRDMTKVVRGEGAYLYTEDGRRLIDAISSWWVVTHGHCHPCIVNAIREQAGKLNQVIFAGYTHDPAEQVATELLKVTSPALEHVFFSDSGSTSVEVALKMALGYWRNTGRERTKIVVMQHSYHGDTIGAMSVGSRGIFNAAYGALMFEVTSIPFPARDCEQRALDALENACRNEHPAAFIVEPLILGAGGMLMYSPSVLREMKRICEAFDVLFIADEVMTGWGRTGTLFACEQADVTPDIACYSKGLTAGALPLAVTLCRADIFDAHYSEDRTRTFFHSSSYTANPVACAAAKANLDLWQDQEYRWRLASLARMQEQALAPFRLDSRFANVRRTGTVTAVELNTRDAGYLADIGPRLLAFFQARDLLLRPLGNTIYVMPPYCVTAADLDEIYTAIRDAADLLM

SEQ ID NO: 11628 - protein, 286 aa, Pseudomonas aeruginosa PAO1
MSDYQETLYQGYGQRFSIDNMLHEVRTEHQHLVIFENARMGRVMALDGVIQTTEADEFIYHEMLTHVPILAHGAARRVLIIGGGDGGMLREVAKHKSVERITMVEIDGTVVDMCKEFLPNHSQGAFDDPRLNLVIDDGMRFVATTEERFDVIISDSTDPIGPGEVLFSENFYQACRRCLNEGGILVTQNGTPFMQLEEVRTTAARTDGLFADWHFYQAAVPTYIGGAMTFAWGSTHEGLRRLPLETLRQRFRDSGIATRYYNADIHLGAFALPQYVLQAIGKQDND

SEQ ID NO: 11629 - protein, 165 aa, Escherichia coli B
TANEIAALAFVNTVVATAAAILGWIFGEWALRGKPSLLGACSGAIAGLVGVTPACGYIGVGGALIVGVVAGLAGLWGVTMLKRLLRVDDPCDVFGVHGVCGIVGCIMTGIFAASSLGGVGFAEGVTMGHQLLVQLESIAITIVWSGVVAFIGYKLTDLTVGLRVP

SEQ ID NO: 11630 - protein, 322 aa, Xanthomonas campestris pv. campestris str. ATCC 33913
MTASPSKLAQLRDLSVVVADTGDYDAIKRLKPVDCTTNPTLVKKALDLPVYADLIERELAWGRAHGGEDRNSTINEVADRLTVGVGTMLSELVPGRVSTEVDADLAHDTQATIAKARKFIAMYAERGVSKDKILIKIAATWEGIEAARQLQQEGIDCNLTLIFNRSQALACAEAGVFLISPFVGRILDFFVAKGQTPASIDEDPGVVFVRGVYDEFKRRGSSTVVMGASFRSTAQIEALAGCDRLTISPDLLEKLDADHGDLPRKLSPLNADNAAITPINSDSFATDLAADDMATEKLASGIDTFAKDLEALRKTIADKLAG

SEQ ID NO: 11631 - protein, 407 aa, Thlaspi arvense
YQGVYPVKGNQDRFVVEDIVKFGSPFRFGLEAGSKPEILLAMSCLCKGNPDAFLVCNGFKDAEYISLALLGRKLALNTVIVLEQEEELDLVIDLSQKMNVRPVIGLRAKLRTKHSGHFGSTSGEKGKFGLTTTQIVRVMRKLSQSGMLDCLQLLHFHIGSQIPSTSLLSDGVAEAAQLYCELVRLGAHMKVIDIGGGLGIDYDGSKSGESDLSVAYTLEEYAEAVVASVRFVCDRRSVKHPVICSESGRAIVSHHSVLIFEAVSAVKPMAHHANPDDIQFLLEGNEEARANYEDLYAAVMRGDHESCLLYVDQLKQRCVEGFKDGVLSIEQLASVDGLCEWVLKAIGASDPVHTYNINLSVFTSIPDLWGIEQLFPIVPIHKLDQRPGARGILSDLTCDSDGKIDKF

SEQ ID NO: 11632 - protein, 443 aa, Zea mays
MEDAMAADGKSVLQGRYELGRVLGHGNFGRVHAARDLRTGRSVAVKVVAKDKLERAGMAEQIKREIAVMKMVSHPNIVELHEVMATRSKIYLALELVRGGELFSRIARAGRVREDVARCYFRQLVAAVDFCHGRGVFHRDLKLENLLLDEVGNLKVADFGLSALAGHARSDGLLHTACGTPSYVAPEVLGGKGYDGAKADLWSCGVILYVLLVGSLPFHEDNLMVMYRKMQRGEFLCPPWVSADARKLIGELLDPDPSTRITVARLVETPWYRKPLPVLPPLNLKEPTPDARRATSDKEEPEVLNAFHLISFSEGFDLSPLFDQGRGGGVGRSSAGGIRFVTREAASSVVSRLESLVTGRGANMRVTKSGSRGVRLEAVSRGRSGARLAVAAEIFSVAPSVLLVDVKKDGGDTMEYRSFCCEELRPALKDIVWASSQDTPGAA

SEQ ID NO: 11633 - protein, 423 aa, Chlamydophila pneumoniae TW-183
MDKQSSGNSGCIWHPFTQSALDSTPIKIVRGEGAYLYAESGTRYLDAISSWWCNLHGHGHPYITKKLCEQAQKLEHVIFANFTHEPALELVSKLAPLLPEGLERFFFSDNGSTSIEIAMKIAVQYYYNQNKAKSHFVGLSNAYHGDTFGAMSIAGTSPTTVPFHDLFLPSSTIAAPYYGKEELAIAQAKTVFSESNIAAFIYEPLLQGAGGMLMYNPEGLKEILKLAKHYGVLCIADEILTGFGRTGPLFASEFTDIPPDIICLSKGLTGGYLPLALTVTTKEIHDAFVSQDRMKALLHGHTFTGNPLGCSAALASLDLTLSPECLQQRQMIERCHQEFQEAHGSLWQRCEVLGTVLALDYPAEATGYFSQYRDHLNRFFLERGVLLRPLGNTLYVLPPYCIQEEDLRIIYSHLQDALCLQPQ

SEQ ID NO: 11634 - protein, 407 aa, Thellungiella salsuginea
YQGVYPVKGNQDRFVVEDIVKFGSPFRFGLEAGSKPEILLAMSCLCKGNPDAFLVCNGFKDAEYISLALLGRKLALNTVIVLEQEEELDLVIDLSQKMNVRPVIGLRAKLRTKHSGHFGSTSGEKGKFGLTTTQIVRVMRKLSQSGMLDCLQLLHFHIGSQIPSTSLLSDGVAEAAQLYCELVRLGAHMKVIDIGGGLGIDYDGSKSGESDLSVAYTLEEYAEAVVASVRFVCDRRSVKHPVICSESGRAIVSHHSVLIFEAVSAVKPMAHHANPDDIQFLLEGNEEARANYEDLYAAVMRGDHESCLLYVDQLKQRCVEGFKDGVLSIEQLASVDGLCEWVLKAIGASDPVHTYNINLSVFTSIPDLWGIEQLFPIVPIHKLDQRPGARGILSDLTCDSDGKINKF

SEQ ID NO: 11635 - protein, 154 aa, Brassica napus
ESAQSQFWVVDAQGLITEGRDNIDPEALPFARKTKEMERQGLKEGASLVEVVREVKPDVLLGLSAVGGLFSKEVLEAMKGSTSTRPAIFAMSNPTKNAECTAQEAFSILGDNIIFASGSPFKNVDLGNGHVGHCNQGNNMYLFPGIGLGVLLSG

SEQ ID NO: 11636 - protein, 261 aa, Triticum aestivum
GRDVSSHGEGLPHVSEDYLKAVDKAKRKLRGLIAEKNCAPLMLRLAWHSAGTFDVATKTGGPFGTMKCPAELAHGANAGLDIAVRLLEPIKEQFPILSYADFYQLAGVVAVEVTGGPEVPFHPGRQDKPEPPPEGRLPDATQGSDHLRQVFSTQMGLSDQDIVALSGGHTLGRCHKERSGFEGAWTANPLIFDNSYFTELLCGEKEGLLQLPTDKTLLTDPAFRPLVDKYAADEDAFFADYAEAHLKLSELGFGEAVEGCC

SEQ ID NO: 11637 - protein, 407 aa, Nasturtium officinale
YQGVYPVKGNQDRFVVEDIVRFGSPFRFGLEAGSKPEILLAMSCLCKGSPDAFLVCNGFKDAEYISLALLGRKLALNTVIVLEQEEELDLVIDLSQKMNVRPVIGLRAKLRTKHSGHFGSTSGEKGKFGLTTTQIVRVVSKLSQSGMLDCLQLLHFHIGSQIPSTSLLSDGVAEAAQLYCELVRLGAHMKVIDIGGGLGIDYDGSKSGESDLSVAYSLEEYAEAVVASVRFVCDRRSVKHPVICSESGRAIVSHHSVLIFEAVSADKPMVHQATPDDIQFLLEGNEEARANYEDLYAAVMRGDHESCLLYVDQLKQRCVEGFKEGVLSIEQLASVDGLCEWVLKAIGASDPVHTYNINLSVFTSIPDLWGIEQLFPIVPIHKLDQRPGARGILSDLTCDSDGKINKF

SEQ ID NO: 11638 - protein, 464 aa, Clostridium perfringens str. 13
MLFGKNELGSQFETPIFGTVESNESIPKYELAKKSIAPQVAYRLIKDDLLDEGNARQNLCTFCQTYMDDEAVKLMAETLEKNAIDKSEYPQTTDLENRCVNILADLWHAPKDESFMGTSTVGSSEACMLGGMAMKFRWRNRAKALGMDVTSRKPNLVISSGYQVCWEKFCVYWDIEMRLVPMDEEHMSINVDKVLDYVDDYTIGVVGILGITYTGKYDDIKALDKKLEEYNKTAKLTVPMHIDAASGGMFAPFIEPELEWDFRLKNVVSISTSGHKYGLVYPGIGWVLWRDKEYLPQELVFDVSYLGGKIPTMAINFSRSASQIIGQYYNFLRYGFEGYRQIHQRTKDVAMFLASELEKTGLFQIYNNGENLPIVCYKLRDDVNVDWTLYDLADRLLMKGWQVPAYPLPADLQDTIIQRIVCRADLSHNLAELYLRDLKAAIEDLNNARVLNQKSKTGVQGFTH

SEQ ID NO: 11639 - protein, 157 aa, Musa acuminata
MAGESCNLDKDEAEIFKPSPSSSPSPSPPSPPSSSQPPPPSSVLLKPSEESGIQRPEIPESPPAPTITFAASSTPKLDEEPSNPGEESPAPVRFSNRCSACRKKVGLTGFRCRCGDLFCGRHRYSDAHECSFDYKAAGREEIAKANPVIKAAKIIKI

SEQ ID NO: 11640 - protein, 236 aa, Rickettsia sibirica 246
MIDYTKTLTAASKNKTFDEGLRQYMLKVYNYMALALLLTGVAAVTTISVEPIYNLMFQTGFGTIIMFAPLGIALYFFMGFGQMNLPTAQILFWVYAGLTGMSLAYLALIYTGASIARTFFICSSVFGAMSLYGYSTSRDLTSMGSFFAMGLIGLIIASLVNLFLKSSALSFATSLIGIVIFMGLIAWDTQKIKSMYYMAGNDEVGQKLSIMAAFTLYLDFINLFLYLMRFLGNRRD

SEQ ID NO: 11641 - protein, 335 aa, Burkholderia fungorum LB400
MKLLIVSALGVATSIAFATSGAHAQRAPASVNDGIATVVAKRQQSLVGTRDFIDRRAAFEKLMAQVPVPDGVTIHHVDANGVPGKWVSLNHARVSGTHGRRVILYLHGGGFYSGSSNSHRALAATLARDAGADVLLPDYRRMPEARYPAQIDDAVTSYEWLLKQGYFASDIAVAGESAGGNLVLELALRLRAAHRPLPSSLVAMSPIMDLTASGDSTRTLASLDPVLTRAGLLDVTKVYMQGADPRSPDASPLFADLHGLPPLLLQVGAREILLDDSLRIARVAALDDVAVSVEVWPGMVHQWQLFPDVVPEARRALRNCAEFIDAHMARVATTQ

SEQ ID NO: 11642 - protein, 176 aa, Triticum aestivum
  unsure (1)..(176): unsure at all Xaa locations
MAPTVMASSATSVAPFQGLKSTAGXLPSAAAPTAASLGSVSNGGRIRCMQVWPIEGIKKFETLSYLPPLSTEALLKQVDYLIRSKWVPCLEFSKVGFIFREHNASPGYYDGRYWTMWKLPMFGCTDATQVINEVEEVKKEYPDAYVRIIGFDNMRQVQCVSFIAFKPPGCEESGKA

SEQ ID NO: 11643 - protein, 267 aa, Corynebacterium glutamicum ATCC 13032
MVATSQFIDDSEAAQAVRAAIVAGYRNIDTALAYGNERGVGEGIRTAGVPREELFISTKLAAEIKDYDGAVAAIDESLAKIGLDYVDLMLIHSPQPWSDFRGGDYSEGNREAWRALEDAYKAGKIRSIGVSNFLEADLENILDSATVAPHVNQLLVHVGNTPSELISFCDSKGILVEAYSPIAHGEMLKNQQVKAIADKYNVSIPQLCIRYTIQLGTVSLPKTANPDHMSSNAQIDFEISEEDMAALQEVTARDYGEHSGFPVYSGK

SEQ ID NO: 11644 - protein, 500 aa, Beta vulgaris subsp. vulgaris
MSMPIPSRQLFIDGEWREPIKKNRIPIINPSNEEIIGDIPAGSSEDIEVAVAAARRALKRNKGREWAATSGAHRARYLRAIAAKVTERKDHFVKLETIDSGKPFDEAVLDIDDVATCFEYFAGQAEAMDAKQKAPVTLPMERFKSHVLRQPIGVVGLITPWNYPLLMATWKIAPALAAGCTAVLKPSELASITCLEFGEVCNEVGLPPGVLNIVTGLGPDAGAPLAAHPDVDKVAFTGSSATGSKVMASAAQLVKPVTLELGGKSPIIVFEDVDIDQVVEWTMFGCFWTNGQICSATSRLLVHESIAAEFIDRLVKWTKNIKISDPFEEGCRLGPVISKGQYDKIMKFISTAKSEGATILCGGSRPEHLKKGYFIEPTIISDISTSMQIWREEVFGPVLCVKTFSSEDEALELANDTEYGLASAVFSKDLERCERVSKLLESGAVWVNCSQPCFVHAPWGGIKRSGFGRELGEWGIENYLNIKQVTSDISNEPWGWYKSP

SEQ ID NO: 11645 - protein, 311 aa, Zea mays
MLGCRKADPDLEAGRPSIQVVRASEPTIRLLFVFVLSLPSCRSPAPSSPLRRPSCETLARRAREKLAAMFGYRKADPDLEAGGSSLLYPGMTESPELRWAFVRKIYVILAVQLAMTAAVSAFVVKVPAVSNFFVSSNAGVALYIFLIILPFLVLCPLRYYHQKHPVNLLLLGLFTVAISFAVGMTCAFTSGKIILEAAILTAVVVISLTAYTFWAAKRGHDFNFLGPFLFAAIMVLMVFSLIQIFFPLGKISVMIYGGLASLIFCGYIIYDTDNVIKRYTYDEYIWAAVSLYLDVINLFLSLLQLLRAADS

SEQ ID NO: 11646 - protein, 588 aa, Zea mays
  unsure (1)..(588): unsure at all Xaa locations
MCGILAVLGCSDCSQARRARILACSRRLKHRGPDWSGLYQHEGNFLAQQRLAIVSPLSGDQPLFNEDRTVVVVANGEIYNHKNVRKQFTGAHSFSTGSDCEVIIPLYEKYGENFVDMLDGVFAFVLYDTRDRTYVAARDAIGVNPLYIGWGSDGSVWMSSEMKALNEDCVRFEIFPPGHLYSSAAGAGFRRWYTPHWFQEQVPRTPYQPLVLREAFEKAVIKRLMTDVPFGVLLSGGLDSSLVASVTKRHLVKTDAAEKFGTELHSFVVGLEGSPDLKAAREVADYLGTTHHEFHFTVQDGIDAIEEVIYHDETYDVTTIRASTPMFLMARKIKSLGVKMVLSGEGSDELLGGYLYFHFAPNREELHRETCRKVKALHQYDCLRANKATSAWGXEVRVPFLDKEFVDVAMGMDPEWKMYDKNLGRIEKWVLRKAFDDEEHPYLPEHILYRQKEQFSDGVGYNWIDGLKAFTEQQVTDEMMNSAAQMFPYNTPVNKEAYYYRMIFERLFPQDSARETVPWGPSIACSTPAAIEWVEQWKASNDPSGRFISSHDSAATDRTXTSWRWSTATGTXANGTVNGNDVAVAIAV

SEQ ID NO: 11647 - protein, 494 aa, Salmonella enterica subsp. enterica serovar Typhi Ty2
MSDVTLLAEVTTFLRQRHGQFIAGERQAGNGTNFSVTNPATGKIIADVVSTTPAQAKEAMQSARRAFDVWRKMPTLQRGALLLKLADTLAAHREELAQLESVCSGKTIMLSRGLELDQSVAFLRYFAGWAGKITGETLNVSLPSMGEERYTAFTQRQPIGVVVGIVPWNFSIMIAIWKLAAALVCGCTIVIKPSEYTPLTLLRVAELAKEAGFPDGVINVVNGAGGEIAQQLIAHPDCAKVSFTGSVATGEKVRRSATSSGKRVTLELGGKNAALFLNDLTAQAMVNGILEAGYLNQGQICAAAERFYLPQEKLDTVMTLLRQRLSEIVPGSPLDEKTVMGPLANQVQLEKVLRLIQRAREEGDTIVYGGETLPGEGYFLQPTAVKVRSKNSTLMHEETFGPVCSFIGYQNEKEALSHINDSPFGLAASVWSENISKALRYAEDIDAGMVWVNMHTFLDPAVPFGGMKGSGIGREFGSAFIDDYTELKSVMVRY

SEQ ID NO: 11648 - protein, 441 aa, Pseudomonas syringae pv. tomato str. DC3000
MALTREQQIAALEKDWAENPRWKNVTRTYSAADVVRLRGSVQPEHTFARLGADKLWNLVTQGARPSFRPDKDFVNCMGALTGGQAVQQVKAGIQAIYLSGWQVAADNNSAESMYPDQSLYPVDSVPTVVKRINNSFRRADQIQWKAGKTPGDEGYIDYFAPIVADAEAGFGGVLNAYELMKNMIEAGAAGVHFEDQLASVKKCGHMGGKVLVPTQEAIQKLVAARLAADVAGVPTIILARTDANAADLLTSDCDPYDKAFVTGERTHEGFYKVRAGLDQAISRGLAYAPYADLIWCETAKPDLDEARRFAEAIKKEYPDQLLSYNCSPSFNWKKNLDDATIAKFQRELSAMGYKHQFITLAGIHNMWYSMFNLAHDYARNDMTAYVKLQEQEFADAAKGYTFVAHQQEVGTGYFDDMTTVIQGGVSSVTALTGSTEEEQFH

SEQ ID NO: 11649 - protein, 160 aa, Triticum aestivum
  unsure (1)..(160): unsure at all Xaa locations
MXPTVMXSSXNSVAPFXGLKSXAXLPVSRRSNGASLXSVSNGGRXRCMQVWPIEGIKKFETLSYLPPLXTEXLLKXVDYLIRSKWVPCLEFSKXGFIFREHNASPGYYDGRYWTMWKXPMFGCTDATQVINXVEEVKKXEYPDAYVRINRXSTTMRQGAV

SEQ ID NO: 11650 - protein, 493 aa, Thermoplasma volcanium GSS1
MDGKLYIDGQWVDSSNGDTLTKYNPVTGEVIGKFAAASRDDVDRAFDAAEDAFQKWMDLGSVERSKIIYKAKELIEENRKELENIIIQENGKPVKEAAEEVDGVLDQMQYYAEWARKLNGEVVEGTTNHRKIFQYKVPYGTVVALTPWNFPAGMVARKLAPALLTGNTVILKPSSDTPGSAEWIVKKFIQAGVPKGALNYITGRGSVIGDYIVEHKKVALITMTGSTSTGQRIMQKASANMAKLMLELGGKAPFMVWKDADINNALKTLLWAKYWNAGQSCIAAERLYVHEDIYDTFINKFVELSKKIVVGDPSRADMGPLINTTALKGTEEVVEEAKESGARILYGGSKPDLSGPYKNGYFFLPTIIDNVDQKSKIFQEEIFAPVIGARKVSDVEEMYSLANDSKYGLASYLFTKDPNLIFEAAERIRFGELYINMPGPEASQGYHTGFRLTGQAGEGSRYGILEYLKIKNIYVDYSGKPLQINTVRDDLFQ

SEQ ID NO: 11651 - protein, 404 aa, Escherichia coli
GKKITLQNGKLNVPENPIIPYIEGDGIGVDVTPAMLKVVDAAVEKAYKGERKISWMEIYTGEKSTQVYGQDVWLPAETLDLIREYRVAIKGPLTTPVGGGIRSLNVALRQELDLYICLRPVRYYQGTPSPVKHPELTDMVIFRENSEDIYAGIEWKADSADAEKVIKFLREEMGVKKIRFPEHCGIGIKPCSEEGTKRLVRAAIEYAIANDRDSVTLVHKGNIMKFTEGAFKDWGYQLAREEFGGELIDGGPWLKVKNPNTGKEIVIKDVIADAFLQQILLRPAEYDVIACMNLNGDYISDALAAQVGGIGIAPGANIGDECALFEATHGTAPKYAGQDKVNPGSIILSAEMMLRHMGWTEAADLIVKGMEGAINAKTVTYDFERLMEGAKLLKCSEFGEAIIE

SEQ ID NO: 11652 - protein, 1080 aa, Candida albicans SC5314
MYATAHTIKQQQQQQQQHPPPPLNGGLHASGAPPNSHEAAAIAQQQQQQQQHHNGPGMIVAAAAASANQQAVQARAQQQQQQQQQRLPSSAALNETTVSTWLAIGSLAESLGDIERATASYNSALRHSPNNPDILVKIANTYRSKDQFLKAAELYEQALNFHVENGETWGLLGHCYLMLDNLQRAYAAYQRALFYLENPNVPKLWHGIGILYDRYGSLEYAEEAFVRVLDLDPNFDKANEIYFRLGIIYKHQGKLQPALECFQYILNNPPHPLTQPDVWFQIGSVYEQQKDWNGAKDAYEKVLQINPHHAKVLQQLGCLYSQAESNPSTPANGAAPPHKPFQQDLTIALKYLKQSLEVDQSDAHSWYYLGRVEMIRGDFTAAYEAFQQAVNRDARNPTFWCSIGVLYYQISQYRDALDAYTRAIRLNPYISEVWYDLGTLYETCNNQISDALDAYRQAERLDPNNPHIKARLEQLTKYQQEGNTHPPQPPPSSQQPRLPQGMVLESTQQQQQQQPPPPPQQQQQQLQHQSQSQPQPQQPPQTQSQPSLLQHQSSLPPQQIQPLHQQAAKPLVNQQQSPPPPHLMNLGQPGQQPQQLPPHLPPHTQQPSQIQEKPPTQEQPHYQPPPPPQHQQQSQSQPQPPHQPQHTQNQSPQLAQLPPHHSNPPAKPHGAPQQRTGLPDLLHNSANIISAPSQVPQPQQQYQQPHIAPVRQEQVNHVPSIYSAPRPTETTLPQINNPNESTTTQVPQLKKEEPKPEATVSAPVPEAIKVQDQVTIQESAPAAAAAVSAPASAPVGDIKTDTVSTTTPATSTTADAVPVSVSQVGEAPNVVQEKKVPDTEQIVSQVEKPVESQPEVTPAPTPAPALATAPTEPAPTDKDVVMAPSKSATPVPQSIVEQNTRVSEATKAPESNGKHDLEDKNDEEKILKRPTVETTTESVPVNQPVEKENEKVEVPPPSEQPSSEKREKEVNGSIKKPLENESKVDIPQFSSNITAQNEEAKSGEETKKDTTKTSPAKQGEVKEVIPSSTETVSKPDVEKDNKEKDKDEDEVMADEDDVKKDENPEPPMRKIEEDENYDDE

SEQ ID NO: 11653 - protein, 372 aa, Glycine max
MAPSLETSNGEAMHLKQVEEEQDGILFAMNMMSTMVYPFVVRTAIELGIFDIIAKAGEGAKLSAEEIIEQLGTKNPEAPTMLDRLLRLLASHSMLSSSLDTEDLQHGQNSPKRLYSLTYASKYFVTDADGVSFGATLNLLLDKVFLESWTELKGAILEGGVAFNRVHSMHSFEYPAVDPRFNDVFNKAMFNLTTIVMKRVLEFYEGFKNINRLVDVGGGLGINLNLITSKYPHVQGVNFDLPHVIEHAPTYPGIEHVGGDMFESVPNGDAIFMKWILHDWSDEQCLKLLKNCHKAIPSDGKVIVVDLILPILPESTVTAKSGFQADLLMMTQNSGGKERTQHEFMELALSSGFSGIKIVCSVSGFWVMEFYK

SEQ ID NO: 11654 - protein, 119 aa, Triticum aestivum
TPSKAKYRRETDSEQVPRGKDEKDFEKRVKECLKLPGGKRMGHNEMTVPLTSAAIREVDVVGIFRYKDTWPLCLEFLRSGKIDVKPLITHRFGFSQGEVEEAFEVSARGRDAIKVMFNL

SEQ ID NO: 11655 - protein, 493 aa, Bordetella bronchiseptica RB50
MQDSQDNGQSGLAAMWIGGRETLAQDGQTIEIANPATRQPLARVPRGRQAEVDLAVAAASQAYAGWRACSPRERADALLRIADSLAAESEALARLLATETGNALRTAARPEAQGAAGIFRYYAGVAGEAKGETVPGAEGTLAYSVREPLGVVAAIIPWNSPVAAAAVKIASAIAVGNTIVVKTAEDAPLSALKLAALCNAALPAGVVNCLTGYGSECGAALAMHPGVRKISFTGSTETGKAIMRAAADRIVPVSLELGGKSPSIVYPSANCDWAVDGVMTAMRFTRQSQSCTAGSRLFVHRDIYDDFLRKLAGRLDRLVVGDPLDEATDMGALINQRQHAKVNDYIACGLAEPSARLLAGGPSPGEGRLAQGYFALPTLIAGVDNGWRVAREEIFGPVLVAIPWSDERQVLEMANDTHYGLAAYVWTTDLGEAMRGASALDAGWIQVNRGHAPGVGVSFGGVKNSGFGREFSLEGMLDSFTQRKSVTLDFSHA

SEQ ID NO: 11656 - protein, 405 aa, Arabis drummondii
YQGVYPVKCNQDRFIIEDIVEFGSSFRFGLEAGSKPEILLAMSCLCKGNPEAFLVCNGFKDSEYISLALFGRKLELNTVIVLEQEEELDLVIDLSQKMNVRPVIGLRAKLRTKHSGHFGSTSGEKGKFGLTTIQILRVVRKLRQVGMLDCLQLLHFHIGSQIPSTALLSDGVAEAAQLYCELVRLGAHMKVIDIGGGLGIDYDGSKSGESDLSVAYSLEEYAAAVVASVRFVCDQKSVKHPVICSESGRAIVSHHSVLIFEAVSAGQQHDTPTDVQFMLEGYSEEVRGDYENLYGAAMRGDRESCLLYVDQLKQRCVEGFKEGSLSIEQLAGVDGLCESVIKAIGASDPVLTYHVNLSVFTSIPDFWGIDQLFPIVPIHKLDQRPVARGILSDLTCDSDGKMDKF

SEQ ID NO: 11657 - protein, 142 aa, Brassica napus
MRSPISRFVSRSILFLHRATPLTAATRHLCAVASPEARTKKLDRIADELLKLNRIELYDYSILFSHKLGLNRYGSSVSVNAGDLPAGASASAETKAAEKTAFDVKLEKFEAASKIKVIKEIRAFTELGLKEAKELVEKAPVV

SEQ ID NO: 11658 - protein, 182 aa, Trichoderma atroviride
  unsure (1)..(182): unsure at all Xaa locations
QRQAEGKPTDKPNIIMSSAVQVCWEKAARYFEVEEKYVYCTPDRYTIDPQQAVDLXDENTIGIAAILGTTYTGHYEDVKGINDLLEEKGLDVSIHVDAASGGFVAPFVLPDLEWDFRLPRVVSINASGHKYGLVYPGVGWVVWRSHEYLPQDLIFNINYLGAEQSSFTLNFSKGASQVIGQY

SEQ ID NO: 11659 - protein, 405 aa, Barbarea vulgaris
YQGVYPVKCNQDRFIIEDIVEFGSKFRFGLEAGSKPEILLAMSCLCKGNPEAFLVCNGFKDSEYISLALLGKKLELNTVIVLEQEEELDLVIDLSQKMNVRPVIGLRAKLRTKHSGHFGSTSGEKGKFGLTTIQILRVVRKLRQVGMLDCLQLLHFHIGSQIPSTALLSDGVAEAAQLYCELVRLGANMKVIDIGGGLGIDYDGSKSGESDLSVAYTLEEYAAAVVASVRFVCDQKSVKHPVICSESGRAIVSHHSVLIFEAVSAGQQHETPSDVQFMLEGYSEEVRADYENLYGAAMRGDRESCLLYVDQLKQRCVEGFKEGSLSIEQLAGVDGLCESVIKAIGASDPVLTYNINLSVFTSIPDFWGIDQLFPIVPIHKLDQRPVARGILSDLTCDSDGKIDKF

SEQ ID NO: 11660 - protein, 401 aa, Brassica nigra
YQGVYPVKCNQDRFIIEDIVRFGSSFRFGLEAGSKPEILLAMSCFCKGNPEAFLVCNGFKDSEYVSFALLGRKLELNTVIVLEQEEELDLVIDLSPKMNVRPVIGLRAKLRTKHSGHFGSTSGEKGKFGLTTIQILRVVRNLRQLGMLDCLQLLHFHIGSQIPSTALLSDGVAEAAQLYSELVRLGAHMKVIDIGGGLGIDYDGSKSGESDLSVAYTLEEYAEAVVASVRFVCDQKSVKHPVICSESGRAIVSHHSVLIFEAVSAVKQHANPDDIQFLLEGEEAEYEDLYGAVMRGDRESCFLYVDQLKQRCVEGFKDGSLSIEQLVSVDGLCESVLKAIGASDPVQTYNINLSVFTSIPDFWGIDHLFPIVPIHKQDQRPGARGILSDFTCDSDGKIDKF

SEQ ID NO: 11661 - protein, 487 aa, GIBBERELLA ZEAE PH-1
MIANPSLQHHHSHDSSSSYRSGSRSRHSTTPRAQRTAAELADFNSNHSSTAWSPATTTATATAPTSESTPTPASAGQTAHVSATGGASRFPSPPPSSSPAAATGPAYADDAKSSSMASDARDSGPLGHASRSGPVSHASAAQQPSPASDDFQISNQAYPLSGGPSQPPEQKVIHIRDLAHIQSLASADLLSGNGGSGILNDPPLQQMKYEISGMPIGDIIEMVAALLTKITTTNDLQHDAMQRNVAHQQQANQSGDSSGSSISSLNHSVLAFHGKNVPAITILSYLSRIHKYCPTTYEVFLSLLVYFDRMTERVNDMVTKNEEIRRQTQSQQTNTKTPQDTPMRGEGMNDTDESDSDLADDDDEEMTDAARQSRPSSNKGAATPTEHPAIAAATYFVVDSFNIHRLIISGVTCASKFFSDVFYTNSRYAKVGGLPLVELNHLELQFLLLNDFRLAVPVEDLEAYATMLVEFYAREVVAKQAGAGSTE

SEQ ID NO: 11662 - protein, 348 aa, Listeria monocytogenes EGD-e
MKALKLYGKRDLRYEEADMPTIEEPDDVILKVKTVGICGSDISRYSKLGPYVPGMVWGHEFSGEVIEVGSEVTDIEIGDRAAGCPALYCGECEYCKKGEFARCRKLTVIGARHPGAYAEYIKLPAENVVKIPNELDYEAAALVEPSAVVVHGFYHTKLQAGDDVVVVGSGNIGLLAIQWAKVFGARRVIAIDVDDKKLALAKEVGADVVINSLKEDPLEVVAAHTDGLNADLVVEAAGSPITSAQVFAYAKKGGGVVFLGIPYADVTIERFYFEKIVRSELTVWGSWNAISAPFPGKEWQTTIHFLANKQINIEPMITHRLSLAEGPEVFERIYERNEFFGKVLFFPE

SEQ ID NO: 11663 - protein, 181 aa, Triticum aestivum
  unsure (1)..(181): unsure at all Xaa locations
YSPWAPTVMASSATSVAPFQGLKSTAGXPVSRRSNGASLGSVSNGGRIRCMQVWPIEGIKKFETLSYXCPPLSTEALLKQVDYLIRSKWVPCLEFSKVGFIFREHXRHPPGYYDGRYWTMWKLPMFGCTDATQVINEVEEVKKEYPDAYVRIIGFDNMRQVQCVSFIAFKXPPGCEESGKA

SEQ ID NO: 11664 - protein, 404 aa, Corynebacterium efficiens YS-314
MIGVSRPTPQNSYPGGSTVIVSTKPLTDRSRLSEAHAEMIKATLPLVGSKINDITPVFYNRMFTAHPELLRSTFNRANQKQGDQQKALAASIATFATMLVDPEAPDPVDMLARIGHKHVSLGITADQYNIVHEHLFGAIVEVLGADVVTPPVAEAWDAVYWLMANVLIDLESDLYASNDLAPGDVFRHVTVTGKKQLSDKVWEYTFEGDLVTPAPGQYTSIGVKLPDGARQLRQYSLLSGTDSQYRIAVEDNGEVSTFLRDNVEVGDTIEASVAAGDLVMNDDVNPVVLISQGIGSTPMVGMLNQVAADRHVTVLHADQSEKDHAQREEMVALVGGLANGALYTFYRDADQWLNVAGHIPSDASVYLCGGNEFLQNVRGQLENLEEQPREIRFELFSPNDWLIS

SEQ ID NO: 11665 - protein, 183 aa, Shigella flexneri 2a str. 301
MQDSILTTVVKDIDGEVTTLEKYAGNVLLIVNVASKCGLTPQYEQLENIQKAWADRGFVVLGFPCNQFLEQEPGSDEEIKTYCTTTWGVTFPMFSKIEVNGEGRHPLYQKLIAAAPTTVAPEESGFYARMVSKGRAPLYPDDILWNFEKFLVGRDGKVIQRFSPDMTPEDPIVMESIKLALAK

SEQ ID NO: 11666 - protein, 167 aa, Helianthus annuus
MATQSKKTLYDFTVKDAKGNDVDLSVYKGKVVLIVNVASKCGLTNNSYDELNQIYLKYKEKGFEILAFPCNQFGQQEPGTNEEIVDFVCTKFKSEFPIFDKIDVNGENAAPVYEFLKTGFYGILGGDIQWNFSKFLVDKNGQPVDCYYPTTSPLTVERDIQKLLGLL

SEQ ID NO: 11667 - protein, 233 aa, Zea mays
  unsure (1)..(233): unsure at all Xaa locations
MAQILLHGTLHATIFEAESLSNPHRATGGAPKFIRKLVEGIEDTVGIGKGTTKIYATVDLEKARVGRTRMVSNEPVNPRWYESFHIYCAHMAADVVFTVKIDNPIGASLIGRAYLPVEDILGGDEIDKWLEIRDEKREPIGDSKIRVKLQYFDVGKDRNWXARGVRSTRYPGVPYTFFSQRQGCKVTLYQDAHVPDNFVPRIPLADGKNYEPHRVXWEDIFDAISKGQHLIYI

SEQ ID NO: 11668 - protein, 249 aa, Cucumis sativus
PGKCYPVVSEEYQKAIEKAKRKLRGFIAEKNCAPLMLRLAWHSAGTFCKDSKTGGPFGTMRFKSELAHGANNGLDIAVRLLEPIKEQFPILSYADFYQLAGVVAVEVTGGPDVPFHPGREDKPEPPPEGRLPDATKGSDHLRDVFYTMGLSDQDIVALSGGHTLGRAHKERSGFEGPWTTNPLIFDKSYFTELLTGEKEGLLQLASDKALLSDPVFRPLVEKYAADEDAFFADYAEAHQKLSELGFADA

SEQ ID NO: 11669 - protein, 373 aa, Candida albicans
MSVKTQTITVLPGDHVGTEIVNEPTKVLKAIEAPTPYQKIQFDFKHHLIGGAAIDATGVPLPDDALESAKSSDAVLLGAVGGPKWGTGTVRPEQGLLKIRKELNLYANIRPCNFASDSLLELSPLKAEVVKGTNLIIVRELVGGIYFGERQEQEESEDHQTAWYRPKYTVDEVTRITRMAAFMALQHNPPLPIWSLDKANVLASSRLWRKTVDKVISEEFPALSVQHQLIDSAAMILIQNPTKLSGIIITSNMFGDIISDEASVIPGSLGLLPSASLASLPDTNTAFGLYEPCHGSAPDLPANKVNPIATILSAASMLRLALDCVKETEALEEAVKQVLDSGIRTADLRGTSSTTEVGDAIAETVTKILKQNT

SEQ ID NO: 11670 - protein, 153 aa, Brassica napus
MAPTVMASSATSVAPFQGLKSTAGLPVSRRSNGASLGSVSNGGRIRCMQVWPIEGIKKFETLSYLPPLSTEALLKQVDYLIRSKWVPCLEFSKVGFIFREHNASPGYYDGRYWTMWKLPMFGCTDATQVINEVEEVKKEYPDAYVRIIGFDNM

SEQ ID NO: 11671 - protein, 421 aa, Arabidopsis thaliana
MEKKGSVLMLRYEVGKFLGQGTFAKVYHARHLKTGDSVAIKVIDKERILKVGMTEQIKREISAMRLLRHPNIVELHEVMATKSKIYFVMEHVKGGELFNKVSTGKLREDVARKYFQQLVRAVDFCHSRGVCHRDLKPENLLLDEHGNLKISDFGLSALSDSRRQDGLLHTTCGTPTYCAPEVISRNGYDGFKADVWSCGVILFVLLAGYLPFRDSNLMELYKKIGKAEVKFPNWLAPGAKRLLKRILDPNPNTRVSTEKIMKSSWFRKGLQEEVKESVEEETEVDAEAEGNASAEKEKKRCINLNAFEIISLSTGFDLSGLFEKGEEKEEMRFTSNREASEITEKLVEIGKDLKMKVRKKEHEWRVKMSAEATVVEAEVFEIAPSYHMVVLKKSGGDTAEYKRVMKESIRPALIDFVLAWH

SEQ ID NO: 11672 - protein, 428 aa, Bdellovibrio bacteriovorus HD100
MKALGRHILVEFSGCNAEVLNDVSIIERSMVEAAQIAGATVINSTFHHFSPWGVSGVVVIQESHLAIHTWPEYRYAAVDLFTCGDSVDPWVSFEHLKKAFQANYSALEMNRGSLHVIQKSDFQPKIMREKPSFDLSKGHQIDRNVWFTDKDENQALSLRYTGDVLFDETNPFQRVRVLDSYSHGKFLAINNMVMCTERDEYHYHEMITHPVMQTHGNAKNVLVIGGGDGGTIRELFKYNVDNVTMVEIDEAVVRASKEHLPKIACEFNNPKLNLIIGDGIQFVKDAPANSYDVIIVDGSDPVGPAKGLFTAEFYNNCKNALKDGGLVITQGESPMFHEGTFVELNHCLKGIFGKQSVHTMLFHATTYPSGMWSLQVAVKGSKHPAKDFNKDQAAKFAQDKGLKYYNEDLHTAAFSLPTFVKTMLGDNA

SEQ ID NO: 11673 - protein, 242 aa, Ceratopteris richardii
  unsure (1)..(242): unsure at all Xaa locations
MLNYSFDXVKXISSSDLIXPAGNYYQHVTFNEQGDLADDDGICYDIINSTGEKKRGLTVDQVKYLEMNFTMDFKLEPERKALIAKELGLRPRQVAIWFQNRRARWKNKQLEQDYETLKSSYEALLQENEDMVKRNKALDEENKLLQAEIARLTGISGNVDVPVDIDAKVASPDLDSDSDLESTVKGEKQQNLKSEIGIPAKLDAQSEILESLTLSCLKSQEAIVAFVEQPIGANDSVVACAL

SEQ ID NO: 11674 - protein, 429 aa, Xylella fastidiosa 9a5c
MSDLDKVTLNAGETSLVLPVLKPTLGNGCVDIAKLTKETGLFTYDSGFTATASCKSAITYIDGEKGVLLYRGYPIEQLAEHSSFLEVAYLLMNGELPRKDEFAKFDDEITHHTMMHESLKNFLGGFHYDAHPMAMLAASVASLSAFYHDTLDLNDLEQRRLAAIRLIAKVPTLAAAAHRYSIGWPIRYPRNNLGYVERFLHMMFEVPSEPLQLNPVVTKALDLLFILHADHEQNASTSTVRLVGSTGANPYASVAAGITALWGPAHGGANEAVLKMLEEIGDAKNVDLVIAKAKTKDKNSPFRLMGFGHRVYKHFDPRAKIIREMAHTVLGELGVNDPLLEVALKLEEAALKDDYFVQRKLYPNVDFYSGIIYKAINIPLEMFTVMFAIARTAGWVSHWLEQQVDPEMKISRPRQIYTGHGERDYKDAR

SEQ ID NO: 11675 - protein, 404 aa, Escherichia coli
GKKITLQNGKLNVPENPIIPYIEGDGIGVDVTPAMLKVVDAAVEKAYKGERKISWMEIYTGEKSTQVYGQDVWLPAETLDLIREYRVAIKGPLTTPVGGGIRSLNVALRQELDLYICLRPVRYYQGTPSPVKHPELTDMVIFRENSEDIYAGIEWKADSADAGKVIKFLREEMGVKKIRFPEHCGIGIKPCSEEGTKRLVRAAIEYAIANDRDSVTLVHKGNIMKFTEGAFKDWGYQLAREEFGGELIDGGPWLKVKNPNTGKEIVIKDVIADAFLQQILLRPAEYDVIACMNLNGDYISDALAAQVGGIGIAPGANIGDECALFEATHGTAPKYAGQDKVNPGSIILSAEMMLRHMGWTEAADLIVKGMEGAINAKTVTYDFERLMEGAKLLKCSEFGDAIIK

SEQ ID NO: 11676 - protein, 256 aa, Ceratopteris richardii
MPFIPATMKHHAALDSTDIKGKSKNSCKDLKSRALKRSRQDVVVDSDTEEKRRGLTMEQINILEMKFKEDVELEPERKTLIAKQLGLRPRQVAIWFQNRRARWKNKQVECKYELLKAQYDAVVKEKESITMEHESILEGNRRLHSESIEKANTLGGAISPALPSCNIMSPTDSADCQSEIIMSVDVIEGAISCCHPIQEPSSRMAADVVVETEYSFYSSLDNSFSQFPMLVRQLIANGHCLQDAYDIYLGCEYFYG

SEQ ID NO: 11677 - protein, 114 aa, Bartonella birtlesii
GGANEACLKMLQEIGSVKRIPEFIARAKDKNDPFRLMGFGHRVYKNYDPRAKIMQKTCHKVLKELNIQDDPLLDIAIELEKIALNDEYFVEKKLYPNVDFYSGITLKALGFQPK

SEQ ID NO: 11678 - protein, 192 aa, Ceratopteris richardii
MAWSVSVGSTSIPQDEDETKQSVITSGISKTKGHNQGHRKHPSKDVTKDIGDGDELMCGVEKKRRLTAEQVNFLETSFSMDLKLEPERKAHLAKQLGIQPRQVAIWFQNRRARWKNQQIEQDYESLKASYEAVVEEKERLLKEHDLALEANKRLQAEIARLTRSLQSYDRNGMSEPKGGTAEQWQIRGNVNQ

SEQ ID NO: 11679 - protein, 112 aa, Bartonella alsatica
ANEACLKMLQEIGSVKRIPEFIARAKDKNDPFRLMGFGHRVYKNYDPRAKIMQKTCHEVLKELNIQNDPLLDIAIELEKIALNDKYFVEKKLYPNVDFYSGITLKALGFPTK

SEQ ID NO: 11680 - protein, 445 aa, Arabidopsis thaliana
MIFRRRRMRRNKSQVSQRASVLFPGCGELNYARETGDVTLEATLRKISSSLEDVVEVPDSPEESYISSSRRTGLACISAQENGSDDEITHDEQVATWSAISKETKSLIHLNGVASVASSHLSGFRAKKSSNGLKDHGRPKFSFNSHTHGETSSKISDMAEIFEPDVEDQAIEEDPIIECPNSFDERSENRQGVSVAESREVLHECTKDAVPKLQEIPLDKIRLIKRSSELDSRHEAKSRKFTHKGNSSNFQDSDTDDELPGPMDSGSSSDDEPSYQSSVPNISNQKKQFVGDRFDEAIKASSLSKEGLLFGSPKLSGGSSLYGKLQQIMKQEKETEMEIMRKLQSGIGEADSSGYVDVKVMSRHLEGKLVVCKCSVIDLSGDSLLLKNTQALAAKETETTIIFSPKVCADVDIEIGNFIRVYAPWSVLIPLFRLLSHVTKLFCDI

SEQ ID NO: 11681 - protein, 440 aa, Glycine max
MMGEKSNSNSGDAINSTLLHGKYELGRLLGHGSFAKVYHARHLNTGKSVAMKVVGKEKVVKVGMMEQIKREISAMNMVKHPNIVQLHEVMASKSKIYIAMELVRGGELFNKIARGRLREETARLYFQQLISAVDFCHSRGVFHRDLKPENLLLDDDGNLKVTDFGLSTFSEHLRHDGLLHTTCGTPAYVAPEVIGKRGYDGAKADIWSCGVILYVLLAGFLPFQDENLVALYKKIYRGDFKCPPWFSSEARRLITKLLDPNPNTRITISKIMDSSWFKKPVPKNLVGKKREELNLEEKIKHQEQEVSTTMNAFHIISLSEGFDLSPLFEEKKREEKELRFATTRPASSVISRLEDLAKAVKFDVKKSETKVRLQGQENGRKGKLAIAADLYAVTPSFLVVEVKKDNGDTLEYNQFCSKELRPALKDIVWRTSPAENPTLA

SEQ ID NO: 11682 - protein, 357 aa, Trichoderma atroviride
MAEFVRAQIFGTTFEITSRYSDLQPVGMGAFGLVCSARDQLTNQNVAVKKLMKPFSTPVLAKRTYRELKLFKHLRHENVISLSDIFISPLEDIYFVTELLGTDLHRLLTSRPLEKQFIQYFLYQIMRGLKYVHSAGVVHRDLKPSNILVNENCDLKICDFGLARIQDPQMTAYVSTRYYRAPEIMLTWQKYDVEVDIWSAGCIFAEMLEGKPLFPGKDHVNQFSIITELLGTPPDDVINTIASENTLRFVKSLPKRERQPLRNKFKNADDSAIDLLERMLVFDPKKRITATEALAHDYLAPYHDPTDEPVAEEKFDWSFNDADLPVDTWKIMMYSEILDYHNVEGVPQMEDQQFPPQ

SEQ ID NO: 11683 - protein, 120 aa, Oryza sativa (japonica cultivar-group)
MAPRCATLAVVVVLVAAVVAPPTAVRAAISCSAVYNTLMPCLPYVQAGGTVPRACCGGIQSLLAAANNTPDRRTICGCLKNVANGASGGPYITRAAALPSKCNVSLPYKISTSVNCNAIN

SEQ ID NO: 11684 - protein, 319 aa, Solanum nigrum
MGSKYSKATNSINDASNSSYRVPFESLRVPFVDLQEATNNFDDKFLIGWGVFGKVYMGVLRNGTKVALKKHMPESSQGIEEFRTEIEILSLCSHPHLVSLIGYCDERNEMILIYEYMENGNLRSHLYGSDLPAMSWEQRLEICIGAARGLHYLHTSAVIHRDVKSINILLDDNFVPKITDFGLSKTGTELDQTHVSTAVKGTVGYLDPEYFIRGQLTEKSDVYSFGVVLFEVLCARPAIAHSHSREMISLAEWAVESHNNGQLEQIIAPNIAAKIRPESLKKFGETVVKCLALSSEDRPSMGDVLWKLEYALRLQESVI

SEQ ID NO: 11685 - protein, 401 aa, Brassica oleracea
YQGVYPVKCNQDRFIIEDIVRFGSSFRFGLEAGSKPEILLAMSCFCKGNPEAFLVCNGFKDSEYVSFALLGRKLELNTVIVLEQEEELDLVIDLSPKMNVRPVIGLRAKLRTKHSGHFGSTSGEKGKFGLTTIQILRVVRNLRQLGMLDCLQLLHFHIGSQIPSTALLSDGVAEAAQLYCELVRLGAHMKVIDIGGGLGIDYDGSKSGESDLSVAYTLEEYAEAVVASVRFVCDQKSVKHPVICSESGRAIVSHHSVLIFEAVSAVKQHANPDDIQFLLEGEEAEYEDLYGAVMRGDRESCFLYVDQLKQRCVEGFKDGSLSIEQLVSVDGLCESVLKAIGASDPVQTYNINLSVFTSIPDFWGIDHLFPIVPIHKQDQRPGARGILSDFTCDSDGKIDKF

SEQ ID NO: 11686 - protein, 123 aa, Zea mays
MVSALRFFTCLVLAVCIVASVDAAISCNTVVGSLGTCYVYLRQGGIVPPSCCRGVRNLNGMAQTTPDRQQACKCVQSFTKSVPGLNQNLASGLPGKCGVSLPYPISISMNCDNVKLSGTHISS

SEQ ID NO: 11687 - protein, 180 aa, Salmonella typhimurium
GSMQTIKCVVVGDGAVGKTCLLISYTTNKFPSEYVPTVFDNYAVTVMIGGEPYTLGLFDTAGQEDYDRLRPLSYPQTDVFLVCFSVVSPSSFENVKEKWVPEITHHCPKTPFLLVGTQIDLRDDPSTIEKLAKNKQKPITPETAEKLARDLKAVKYVECSALTQKGLKNVFDEAILAALE

SEQ ID NO: 11688 - protein, 405 aa, Capsella bursa-pastoris
YQGVYPVKCNQDRFIIEDIVEFGSSFRFGLEAGSKPEILLAMSCLCKGNPDAFLVCNGFKDSEYISLALFGRKLELNTVIVLEQEEELDLVIDLSQKMNVRPVIGLRAKLRTKHSGHFGSTSGEKGKFGLTTIQILRVVRKLRQVGMLDCLQLLHFHIGSQIPSTALLSDGVAEAAQLYCELVRLGAHMKVIDIGGGLGIDYDGSKSGESDLSVAYSLEEYAAAVVASVRFVCDQKSVKHPVICSESGRAIVSHHSVLIFEAVSAGQQHETPTDVQFMLEGYSEEVRGDYENLYGAAMRGDRESCLLYVDQLKQRCVEGFKEGSLGIEQLAGVDGLCESVIKAIGASDPVLTYHVNLSVFTSIPDFWGIDQLFPIVPIHKLDQRPVARGILSDLTCDSDGKIDKF

SEQ ID NO: 11689 - protein, 183 aa, Triticum aestivum
MAGVGRNMVAPLLVLNLIMYLIVIGFASWNLNHFINGLTNRPGVGGNGATFYFLVFAILAGVVGAASKLAGVHHVRTWRGDSLATSASSALVAWAITALAFGLACKEIHIGGYRGWRLRVLEAFVIVLMFTQLLDVLALHSGLFGNQFGGNHAGGYPAEHAYGAGGDPHNKGMGMGTGGVARV

SEQ ID NO: 11690 - protein, 293 aa, Triticum aestivum
  unsure (1)..(293): unsure at all Xaa locations
SARGRVTSPQQSFSHQQQPFPQQPYPQQPYPSQQPYPSQQPFPTPQQQFPQQSQQPFTQPQQPTPLQPQQPFPQQPQQPQQPFPQPQQPFPWQPQLPFPQQPQQPFPQPQQPQQQFPQSQQPQQPFPQPQQQFLQPQQPQQSFPQQQQPLIQLSLQQQMNPCKNFLLQQCNPVSLVSSLISMILPRSDCQVMQQQCCQQLAQIPQQLQCAAIHSVVHSIIMQQEQRQGVQIRRPLFQLVQGQGIIQPQQPAQLEVIRSLVLRTLPTMCXVYVSPDCSTINAPFASIVVGIGGQ

SEQ ID NO: 11691 - protein, 143 aa, Saccharomyces cerevisiae
MCRFPRMILATVQKMISEILDQDLMFTKDAREIIINSGIEFIMILSSMASEMADNEAKKTIAPEHVIKALEELEYNEFIPFLEEILLNFKGSQKVKETRDSKFKKSGLSEEELLRQQEELFRQSRSRLHHNSVSDPVKSEDSS

SEQ ID NO: 11692 - protein, 349 aa, Chenopodium rubrum
SKTHFKMTTLETEQEQQPFSQNSPLFLDCLYCEEKYWDYDYHDEDDFGSLNSSKLHDCSLICCEDDEEIQLNALVSKEEKINFDEGDLGGNQLVMETRREALEWMIRVNYHHNFSVITLVLGVNYFDRFMLSFGFQKEMPWMTHLAAVACLSLASKVEETHVPLLLDFQVEHEQIFEAKVVQRMELLVLQHSNGKMNAVTPLSYFGHLIRKLKLKPHFHCKILTRCENIIVSVILDPRFLCYVPSVLAAASMVQTLKEIGLWSILEHQNDIMNTLKLDKVKVEDCYNFIQEVSSNEKARKRKWYNNISSANRNPNNVLELVVSSESSNNDLPSETLPKKCRTMGPPCFG

SEQ ID NO: 11693 - protein, 504 aa, Ralstonia solanacearum GMI1000
MRVSELLSSLSIDGAASVEGGHQVRSPIDGTLIGSVKLVSAKESEAAIERAHAAFLQWRGVPAPVRGELVRLLGVELRRHKEALGRLVTLEAGKLLSEGLGEVQEMIDICDFAVGLSRQLYGLTIASERPGHRMMETWHPVGVVGVISAFNFPAAVWAWNSALAFVCGDSVVWKPSEKTPLTALACDALFRKAVAAFGKAHQGTAPDGLHALIVGGREAGEALVQSKRVPVVSATGSTRMGRLVSARVGERLGRAILELGGNNAMIVAPSADLELATRAITFAAVGTAGQRCTTLRRLIVHESVAANLVERLKRIYGSVTVGNPLQEGTLVGPLIDAGAYAAMARALERADAQGGRVHGGERTHLEAGPEAYYVKPALVEMPAQTEVMQQETFAPILYVLTYRTLDEAIALQNGVPQGLSSAIFTRDLNEAEWFLSAAGSDCGIANVNIGTSGAEIGGAFGGEKETGGGRESGSDAWKAYMRRATNTINYSNRLPLAQGVRFDV

SEQ ID NO: 11694 - protein, 882 aa, Zea mays
MSYTISGGGTAPAAWAWLHGDLELTIHEARGLPNMDLLSTLLRRLCLCPPLAGITPARRRSLSDDDDDSAHAHAHTHPHHHHLRGRLHRRPRRRHEPQPHGHLLLPTSDPYAAVVVAGPHETTVARTYVFRNSEAPRWEASFLLPLAHAATGLEFHVKDADPFGSDLIGVAWLPAAAVLASAAAPIESQWLDLARPDARGPPAPGGGSAIRVSAAFVPAAASRGRSGVGVPAYFPLRRGCDVRLYQDAHVAAGELEGVGVVPGFLPGRCWEDLCMAVLGAQRLVYVAGWSVHTTVRLTREAMSPEMAAKVAELEELGGEPVEHMSLGELLKYKSQEGVRVLLLVWDDRTSHNNFFVKMVVGTLYTHHQKCVLVDTPASESTRRITAFLGGLDLCAGRYDTPSHRLFRDLQTVFHGDVYNPTFGGDVNGPRQPWHDLHCRLDGPAAYDILKNFEQRWRKATKLREMFGGKAAHRKDDALLKLERIPWILSPTKPKQQPPSAAADTGAADHDDDERDQPALHVLPDGDPERWHAQVFRSVDAGSVKRFPRPWERAEMARRHLVGDKNLAVERSIHAAYVAAIRSAERFVYVENQYFIGGSYAWPSYRNGGACNLVPMEIALKVASKVRAGEPFAAYVVLPMWPEGNPGSGPAQEILFWQNQTMEMMYSVVAAALEGKGGHPQEHLNFYCLGNREPAEDAGDGNKWAPADPLDDATTSSAAAHARRHRRFMVYVHSKGMIVDDEYVIIGSANINQRSLAGSRDTEIAVGAYQPDHTGACPRGKVHGYRMSLWEEHLGKEAVRRPEVLRPESPRCVKLVNRIARDNWRRYAADDDKLGPLQGHLLRYPVHVRADGRVEPLPGNELFPDVGGRVVGAPNNLPDYLTM

SEQ ID NO: 11695 - protein, 405 aa, Arabidopsis arenosa
YQGVYPVKCNQDRFIIEDIVEFGSSFRFGLEAGSKPEILLAMSCLCKGNPEAFLVCNGFKDSEYISLALFGRKLELNTVIVLEQEEELDLVIDLSQKMNVRPVIGLRAKLRTKHSGHFGSTSGEKGKFGLTTIQILRVVRKLSQVGMLDCLQLLHFHIGSQIPSTALLSDGVAEAAQLYCELVRLGAHMKVIDIGGGLGIDYDGSKSGESDLSVAYSLEEYAAAVVASVRFVCDQKSVKHPVICSESGRAIVSHHSVLIFEAVSAGQQHETPTDHQFMLEGYSEEVRGDYENLYGAAMRGDRESCLLYVDQLKQRCVEGFKEGSLSIEQLAGVDGLCEWVIKAIGASDPVLTYHVNLSVFTSIPDFWGIDQLFPIVPIHKLDQRPVARGILSDLTCDSDGKIDKF

SEQ ID NO: 11696 - protein, 150 aa, Glycine max
  unsure (1)..(150): unsure at all Xaa locations
MAAAFASRCSRVGRSLSGGLSNSSPGLFTSSHGMTCNNLFSQQQRTFIQMRTVLKVVDNSGAKKVMCIQALKGKKGARLGDTIIASVKEAHPNGKVKKGKVVYGVVVRAAMXRLVDKQGQPSGTRVLGPLPHELRQKKHVKIFTLAGHIA

SEQ ID NO: 11697 - protein, 257 aa, Oryza sativa (japonica cultivar-group)
MSPPLELDYIGLSPPVPAAADAAADNDLKGTELRLGLPGSHSPDRSPPAATLDLLPAAKGAKRGFSDEARPLPASAAAAAAAGKGKKAAAGEEDEDAEEEDKKVAAAPQAPAAKAQVVGWPPIRSYRKNTMATNQLKSSKEDAEAKQGQGFLYVKVSMDGAPYLRKVDLKTYKNYKDLSTALEKMFIGFTTGKDGLSESRKDGEYVLTYEDKDGDWMLVGDVPWEMFANSCRRLRIMKGSDAIGLAPRAVDKSKNRN

SEQ ID NO: 11698 - protein, 320 aa, Oryza sativa (japonica cultivar-group)
MEAEAAAKRARESGDAAAAGAGEQAGISAVIPGWFSEISPMWPEAHSLKVEKVLFQGKSDYQNVMVFQSSTYGKVLVLDGVIQVTERDECAYQEMITHLPLCSIKDPKKVLVIGGGDGGVLREVSRHSSVEQIDICEIDKMVVDVSKQFFPHLAVGFEDPRVSLHIGDVAFLKNAPEGTYDAVIVDSSDPPGPAQELFEKPFFQSVARALRPGGVVCTQAESIWLHMHIIEDIVANCRQVFKGSVNYAWTTVPTYPGVIGFMLCSTEGPTVDFQHPIFNIEDNEFSTKSKGPLKFYNSEIHSASFCLPSFAKRVIGSKAN

SEQ ID NO: 11699 - protein, 418 aa, Desulfitobacterium hafniense DCB-2
MSRIKNLREEALEFHKVQPGKLEVRVTVPAQDRDDLTLAYSPGVAEPVKEIAADLENLDIYTNHANYVSIVSNGTAILGLGDLGAAASMPVMEGKSLLFKAFGDVDAFPLCVNTTDVDKIVEIVELTSPTFGGVNLEDIKAPECFEIEEKLKARGIFKGPIFHDDQHGTAVVTLAGLVNALKVVGKKIEDIKVVANGAGAAGIAIIKLLMSMGLKNVIMCDTKGAIYEGRTVGMNPWKEEIAKATNPEKFSGDLAGALVGADAFIGISAANVLNEDMIRSMAKDPIVFCQANPIPEIWPIERAFEAGAKVISTGRSDVINQINNVLAFPGMFRGAIDVRATDINDAMKVAAAYAIAGIVKDEELSADYIIPSTFNPEVAPAVAAAVAKAAIDSGIARRPMDPQEVADGLKKRLANQYK

SEQ ID NO: 11700 - protein, 128 aa, Brassica napus
MTPAIKAPLLPSHDPSSSSPPEEKHGSLAGAIFNVSTSIVGAGIMSIPAAFKVLGVIPSLSIIVIIAWLSNVSAGFLMKSTVAGDATTYAGVMKESFGKPGSVAVQVITMVVTFGSMIIFSIIIGKMF

SEQ ID NO: 11701 - protein, 146 aa, Glycine max
MASEDDAVKKAMIVDARARNISHNVRCTECGSQSIEDSQADIAILLRKLIRDEIQSGKTDKDIYKKLEDEFGETVLYTPKFDMQTAALWLLPLLIAGSAAGVWAYNRHKQKTNVHIMALNLVRGVPLTPKKKKKSNVPTLEGGARY

SEQ ID NO: 11702 - protein, 181 aa, Arabidopsis thaliana
MENDDITVAEMKPKKRAGRRIFKETRHPIYRGVRRRDGDKWVCEVREPIHQRRVWLRTYPTADMAARAHDVAVLALRGRSACLNFSDSAWRLPVPASTDPDTIRRTAAEAAEMFRPPEFSTGITVLPSAGEFDTSDEGVAGMMMRLAEEPLMSPPRSYIDMNTSVYVDEEMCYEDLSLWSY

SEQ ID NO: 11703 - protein, 274 aa, Ceratopteris richardii
MAWSPVKEEHLPQLVSTESTIEKTLKAKDPCKRPKRRAKKRTGKGSTIDDSIDKRRGLTVEQINFLEMSFKEDNKLEPERKACIAKQLGVRPRQVAIWFQNRRVRWKNKQVEQDYETLKARYQDVVKEKDSIMMQYESTMEGNRKLQAEVARLTNLLQSTEGISAHTDMDQVLSNCNSENLNCISENISPAKSADYPSEIIVSGDPTEGDISRFIFQEPISSMPYDLLPDGDYFILSPENSTGSFPSLVQQLVSNGHCVEDAYNIYLGYEYLCC

SEQ ID NO: 11704 - protein, 227 aa, Ceratopteris richardii
RRSPPKEELDDDDLGDELSNPTEKNRRLTAEQVNFLEMSFNIDLKLEPERKALLAKKLGIRPRQVAIWFQNRRARWKNKQIEQDYESLKTKYEAVIKEREVILLQHEAAMQENKRLQAEVRRLMDLVEATGVGACDVTGVSEGKSELMSPSKSTGRSRVTCKTRVKCHSIAVSASGADVPMPRFELDYGFCRSNDMGVDLHECPTFSLWRIFLGLICPCLFVKFASK

SEQ ID NO: 11705 - protein, 336 aa, Euglena gracilis
MAQTIPDQTALPDTTNWQLSDLTLKETLGTGTFGRVRLCLHKSSGNYYAIKCLKKSEVLRMKQVEHILAEASILGSIRHPFIVNMLKTFQDDKRLYIVLEYVVGGELFSHLRKAGKFPNDVAKFYAAEVILAFEYIHSMDILYRDLKPENLLLDVGGHIKITDFGFAKKVPERTFTLCGTPEYLAPEIIQSKGHGKAVDWWALGILTYEMLVGYPPFFDESPFRIYEKILEGKVQFPKWVDGRAKDLIKGLLTTDHTKRLGTLKRGVTDIKKHKWFYGVDWDMLLARKIPAPIPVKVTTPGDSRYFDRYPESKEDKSQPLTPAQQELFKGFGPYST

SEQ ID NO: 11706 - protein, 323 aa, Salmonella enterica subsp. enterica serovar Typhi Ty2
MKPENKIPVLTRLSDEMTAVVNFQQPGLPPWPADGDIETQRQYYLLERRFWNADAPSMTTRTCAVSTPYGDVTTRLYSPQPTSQATLYYLHGGGFILGNLDTHDRIMRLLARYTGCTVIGIDYSLSPQARYPQAIEETVAVCSYFSQHADEYSLNVEEIGFAGDSAGAMLALASALWLRDKHIRCGNVIAILLWYGLYGLQDSVSRRLFGGAWDGLTREDLDMYEKAYLRNDEDRESPWYCLFNNDLTRDVPPCFIASAEFDPLIDDSRLLHQTLQAHQQPCEYKMYPGTLHAFLHYSRMMTIADDALQDGARFFMARMKTPR

SEQ ID NO: 11707 - protein, 395 aa, Zea mays
EFPGEKPLLSHLRFFPWVVNEVYFKVWRQGRTGYPLVDAGMRELWATGWVHDRIRVVVSSFFVKVLQLPWRWGMKYFWDTLLDADLESDALGWQYISGSLPDGRELDRIDNPQFEGYKFDPHGEYVRRWLPELARLPTEWIHHPWDAPESVLQAAGVELGSNYPRPIVELDAANSRLQDALSEMWELEAASRAAMENGMEEGLGDSTDEPPIDFPQELRMEVDRQPVQPAIHAPGVTGRRREDQMVPSMTSSFIRAETELTADFGHTSEDSRPEVPSNIHHLQARPEREETVDGGTGNAVRVHGNHHQQNLQNNMHRVLGIAPSISEASSSWTGRDGGVVPVWSPPAASGHSDSYAADEADISSRGYLDRHPQSHTMMNWSQLSQSLTTGWEVDN

SEQ ID NO: 11708 - protein, 147 aa, Triticum aestivum
  unsure (1)..(147): unsure at all Xaa locations
GASKTYPQXQAGAIRKGGHIVIKARPCKVVEVSTSKTGKHGHAKCHFVAIDIFNGKKLEDIVPSSHNCDVPHVDRQDYQLIDITDDGYVSLLTESGNTKDDLKLPTDDVLLGQIKTGFADGKDLILSVMSAMGEEQICAVKEIGGGK

SEQ ID NO: 11709 - protein, 250 aa, Plantago major
AGERFTVYVIVPMWPEGLPESASVQAILDWQRRTMEMMYKDVIQAFQARGIQDDPRKYLTFFCVGNREVKKSGEYEPSQQPEPDSDYGRAQAARRFMIYVHAKMMIVDDEYIIVGSANINQRSMDGARDSEIAMGAYQPYHLAARQPARGDIHGFRMSLWYEHLGMLDDSFVRPESEECVQKVNTIADRYWDLFAAEELERDLPGHLLRYPVAVSSEGTITELPGQEFFPDTKARVLGTKSDFLPPILTT

SEQ ID NO: 11710 - protein, 166 aa, Triticum aestivum
  unsure (1)..(166): unsure at all Xaa locations
FPQFQQPHQPFPQPQQQFPQPQQPQQSFXLQPQQPFPQQPQQPFPQQPQXSFPEXPQQPXPQQPQQPFPQXXQQPFPXXQPQQPFXLRPEQPFAQQPQQSQQSFXQXQPQQPXQPCXLQPQXTIXXQPQQXISXAXNEQLSQQPEQTIXQXPQQPLXPSHTNLQPY

SEQ ID NO: 11711 - protein, 435 aa, Thermoplasma volcanium GSS1
MIQLLNNLWVLFSAFLVFLMTIAVGFLEYGELGIALKRSLYKTILITGIAFVVMAVIGFNTAFAPTLYGIIGNPLYKPGFVLGYLNSPTAMFSTIWWATSASYFNTGLLGITYFLFETAFASVTLALVSVVILRKVKMSVFVVFSIVYFIVIYNLPAAWIWNPTGWLYLLGMRDFAGGLVVHGAAGFAGLAIIIRIWQEERKKGIVRSPGEIIKVNDGFLTLAILLLMMGWFGFNPGSVLAFNYDTLIVVMTTFMAALTSMLSTLTVSYLLYKDAGGIMNAVNGILMGLIIVTPLAGFVSPLSAAILGILGGPIFIFANRFFSKRKWFSDPVGLFSGHFTGGIFGVLMIGFFTQHSYAVLSGNSILPNGLFFGGGYLALHTLGIEIMGICAVGLAVFAISYATMYFLSLGFHGILEEPEWKKEERKSLPSSETSK

SEQ ID NO: 11712 - protein, 46 aa, Yersinia enterocolitica
MKGQVKWFNESKGFGFITPADGSKDVFVHFSAIQDQGFKTLAEGQN

SEQ ID NO: 11713 - protein, 282 aa, Candida albicans SC5314
MSYRLIKLNSGHTIPSIGLGCYDIPRNKTVSVVYEACKVGYRHFDTAVLYGNEEEVIEGISKFLRENPNIPRSEFFYTTKLWNNQLGTSSTKQAISTMMAQVGDKLEYIDLLLIHSPLPGKTKRLESWKVLQDAVEKGWIKNIGVSNYGKHHIEELLTNATIPPAVNQIEISPWCMRQDLATWCLSKGINVEAYAPLTHGNKLQVNNTEFQEIMQKYNKSAAQILIKWSLQKGYIPLPKTKTPSRLKENLSVDDFELTNEEIKAIDQPDAYEPTDWECTDAP

SEQ ID NO: 11714 - protein, 194 aa, Ceratopteris richardii
NQGHRKHPSKDVTKDIGDGDELMCGVEKKRRLTAEQVNFLETSFSMDLKLEPERKAHLAKQLGIQPRQVAIWFQNRRARWKNQQIEQDYESLKASYEAVVEEKERLLKEHDLALEANKRLQAEVCFKHAMSLLWSGYEESHVNIYSMTDSITNAYFHCLTRRHSSLILLHFSSQHTLIGFGGICDAWSPTFRYI

SEQ ID NO: 11715 - protein, 216 aa, Magnaporthe grisea 70-15
MAQSGTGAYNNPLKKFKLVFLGEQSVGKTSLITRFMYDSFDGMYQATIGIDFLSKASKPPAHPHRSSESTVRLQLWDTAGQERFRSLIPSYIRDSSVAVVVYDISNAKSFQNTRKWIDDVRAERGNDVIIVLVGNKTDLNDKREVTTQQGEEEAKKNNLMFIETSAKVGHNVQPLFKRIARSLPGMEGTEAAQQAASQMIDVKTNNTQAQQEGCAC

SEQ ID NO: 11716 - protein, 340 aa, Arabidopsis thaliana
MSSTQEASVTDLPVKRPREAEEDNNGGAMETENGGGEIKEPSCMSSIIPGWFSEISPMWPGEAHSLKVEKILFQGKSDYQDVIVFQSATYGKVLVLDGVIQLTERDECAYQEMITHLPLCSISNPKKVLVIGGGDGGVLREVARHSSVEQIDICEIDKMVVDVAKQYFPNVAVGYEDPRVNLIIGDGVAFLKNAAEGTYDAVIVDSSDPIGPAKELFEKPFFESVNRALRPGGVVCTQAESLWLHMDIIEDIVSNCRDIFKGSVNYAWTSVPTYPSGVIGFMLCSSEGPQVDFKKPVSLIDTDESSIKSHCPLKYYNAEIHSAAFCLPSFAKKVIDSKAN

SEQ ID NO: 11717 - protein, 297 aa, Methanopyrus kandleri AV19
MKRETFRYRGDMDLDGFLREMERVGALGAGRLGRAARILEKMWSSDDVTVLLTVAGPAVAGGLGELFERLIREGLVDAVITSGANVVHDALDALGGIHVCLGERNVDGYGRVHDTHIPTEAFEKFEHFMREVLSDLSGRVSCRELLWEMGKRLESGFLRAAADEGVPIYSPGILDSMVGLHVWIHSQDHDFHLDLVDDMHHLADLVFEAEELGAIILGGSVPKHFAMGAAMLRGGLDYAVQITMDRPETGSLSGAPLEEGKSWEKVREDAEVATIVGDYLIIFPLLASGVMQRLGIV

SEQ ID NO: 11718 - protein, 319 aa, Geobacillus stearothermophilus
MKRIGVLTSGGDSPGMNAAIRSVVRKAIYHGVEVYGVYHGYAGLIAGNIKKLEVGDVGDIIHRGGTILYTARCPEFKTEEGQKKGIEQLKKHGIEGLVVIGGDGSYQGAKKLTEHGFPCVGVPGTIDNDIPGTDFTIGFDTALNTVIDAIDKIRDTATSHERTWVIEVMGRHAGDIALYSGLAGGAETILIPEADYDMNDVIARLKRGHERGKKHSIIIVAEGVGSGVDFGRQIQEATGFETRVTVLGHVQRGGSPTAFDRVLASRLGARAVELLLEGKGGRCVGIQNNQLVDHDIAEALANKHTIDQRMYALSKELSI

SEQ ID NO: 11719 - protein, 409 aa, Zea mays
  unsure (1)..(409): unsure at all Xaa locations
QVIVVTXGERILGLGDLGCQGMGIPVGKLALYTALGGVRPSACLPITIDVGTNNEDLLKDEFYIGLKQRRATGQEYSEFLDEFMAAVRQNYGQKVLVQFEDFANHNAFTLLEKYRTNHLVFNDDIQGTAAVVLAGIIAALKSVGGTLADHTFLFFGAGEAGTGIAELVALEISRQANVSVEEARKKIWLVDSKGLIVASREETLQPFKKRYAHEHEPVKDLLGAVKAIRPTALIGSAGVGQSFTKEVIEVMSSINERPIVLALSNPTSQSECTAEQAYTWSQGRAIFGSGSPFDPVKYNDKLFVPAQANNAYIFPGFGLGVVISGAVRVSDDMVLAAAEALAEQVTPEHIEKGLIYPPFSIIRKISANIAAHVAAKAYDLGMATQLPRPKDLVKYAESCMYSPVYRSYR

SEQ ID NO: 11720 - protein, 136 aa, Methanopyrus kandleri AV19
MDVAVKKVEVRQLKKGKYIMIDDEPCKIVEYTTSSPGKHGSAKARIVAVGLFDGKKRTLTKPVDAKVDVPVIERKTAQVVSDMGDTVQLMDMETYETFEVQKPEDEELASQLEPGTMVEYMEAAGKRKIVGIKEEE

SEQ ID NO: 11721 - protein, 122 aa, Candidatus Carsonella ruddii
MIQEQTYLKVADNSGGKVVKCIKVLNGTNKKYANIGEIIKVVVKTANFKSKIKKSQVLKAMIIRSKTGIKRLDGTIIKFNDNSVILLNNNEQIISTRVFGIILRELKNEKFAKLISLSNEII

SEQ ID NO: 11722 - protein, 254 aa, Brassica rapa subsp. rapa
MGRGRVEMKRIENKINRQVTFSKRRAGLLKKAHEISILCDAEVSLIVFSHKGKLFEYSSESCMEKVLERYERYSYAEKQLKAPDSHVNAQTNWSMEYSRLKAKIELLERNQRHYLGEDLESISIKELQNLEQQLDTSLKHIRSRKNQLMHESLNHLQRKEKEILEENSMLTKQIKERESILRTHQNQSEQQNRSHHVAPQPQPQLNPYMISHQASPFLNMGGMYQGEDPTAVRRNRLDLTLEPIYNCNLGYFAA

SEQ ID NO: 11723 - protein, 491 aa, Sinorhizobium meliloti 1021
MALTPALTRHIRRPKIFASLDEVTRSSGQPAGPVFDVSNPSTGELLATLPDMGIDDARTAIDAAALAQPLWAGKPAKDRSIILRRWHDLIVEHADDLAAILTAEMGKPVGEAKGEVLHAASYVEWYAEEAKRVYGETFPAPANDRRMLVIKQPVGVVGTITPWNFPASMVARKISPALAAGCTIVLKPAEQTPLVAGAMFVLAEKAGFPEGVLNLLYASEGAPIGRELCGNPKVRKISFTGSTEVGRLLMRQCSDQIKKVSLELGGNAPFIVFDDADIDEAVDGAVQAKFRNAGQTCVSANRIYVQSAVHDAFAEKFVTRVRELTVGDGFAPDVAIGPMIDAHAIDKIEAHVADAVAKGAQVRSGGSRIGTTGTFFEPTVLTGISHDMRIAQEETFGPIAPIIRFETAEQVVAEANDTIYGLAAYFYAENLKRVWHVAEALEYGMVGINTGRMSSEAAPFGGIKQSGIGREGSRHGLEDYLEMKYLCMGNI

SEQ ID NO: 11724 - protein, 501 aa, Oryza sativa (japonica cultivar-group)
MDGRSILMGRYEVGKQLGQGTFAKVYYARNLTTGQAVAIKMINKDKVMKVGLMEQIKREISIMRLVKHPNVLQLFEVMASKSKIYFVLEYAKGGELFNKIAKEGKLSEDSARRYFHQLINAVDYCHSRGVYHRDLKPENLLLDENENLKVSDFGLSALAESKRQDGLLHTTCGTPAYVAPEVLSRKGYDGAKADVWSCGVILFVLVAGYLPFHDPNLIEMYRKICRADFRCPRYFSAELKDLIHKILDSDPSTRISIPRIKRSTWYRKPVEINAKNSEAATTNSISSGVATTSGSAECSTSEENQGSLSLPNLNAFDIISLSTGFNLSGFFEDTHGHQEERFTTRQPVTTVLGKLKELAKRLKLKVKKKDNGVLRLAAPKEGKKGFLELDAEIFEVTPSFLLVELKKTNGDTMEYRKLVKEDIRPALKDIVWVWQGDEHLNSQSILQGEQQQSPLPPELPQDQLQPSLPQQEKQDMPEPPLLPQVPQEEVQTSIPAEQTKN

SEQ ID NO: 11725 - protein, 284 aa, Schizosaccharomyces pombe
MLIAAMGPKIPVPAYGVGTALFKKEKGEINRTIVDSVKNALAAGFIHIDCAEVYGNEEEVGVALKEANVPRSKLFITSKVMHNVDNIPEALNESLRKLGTDYLDLYLLHSPIPFYEKKIPISEGWKAMETALGTGLVHSVGVSNFRIPDLEELLKTSTITPRVNQIEFHPQVYKAAKPLVEFCQSKGIIVEGYGPLSPLVRDAQGPVAEFTKSLESKYHVSDTQILLKWAYSKGVIPITTTSKIERMKECLNFDSFTLDKADIDELGTLGVQHHKRTFMKHMDE

SEQ ID NO: 11726 - protein, 280 aa, Listeria innocua Clip11262
MTLSFSDTYRLNNGIEMPRHGFGVYKLTDEQRMRTALETAVDVGYRLFDTASFYHNEKELGDFFASSGLKRDEFFVTTKMWNTEQGYDETLRAFEKSQKKLQLDQVDLYLVHWPKQDTFFETWRAVEKLYDEGLVRAIGVSNFEAHHLDRLRTSANVLPVVDQLETHPHFPNQLLHRYLEELHIVHQAWSPLGRGGVLQEQILIDLAKKHGKSPAQIVLRWHLQNNISIIPKSETPSRIRENADIYDFELTEADMRQVERLNNGERVSHAPDVMYVRSEI

SEQ ID NO: 11727 - protein, 296 aa, Euglena gracilis
RSYMEKYAKDEVAYFRDFATAYQRLAELGVPELPVPWDEIRADVAALVAEKGCAPILIRLAWHDAGTYDQQSNTGGPRAVMRFPGGEAEHGSNNGLDIARGLLQPIVDKYSWVSTADLWAFASVVATEVSGGPKIPFRPGRRDAVTAKEAVERGRLPDATQTTNHLRDVFYRMGMTDEEIVALSGAHTMGRCHAERSGFEGPWTDNPLVFDNSYFKLLLERKWTAVTNSVGNLQFQDETGTLMMLTSDLALLMDPSFRKHVERFAADQDAFFRVYAGAYQKLTEGGCPFSKGAVPL

SEQ ID NO: 11728 - protein, 380 aa, Lactococcus lactis subsp. lactis bv. diacetylactis
MVDFNKVLDLHELHTGVLDIQADIDVKKPSDLAEAYTPGVAELSKLIQSDPEAKRKYTMSGKLVAVVTDGTAVLGLGNMGPAGGLPIVEGKALLYKELAGVDAIPIAVEQIGAEKIIETIKNISQSFAGIHLEDISAPQCFEIEERLSKNLNIPVYHDDQAGTAIVVLAGLMNAAKLVNKKLEDLKIVINGVGAAGVATGRLFAEVGIKNVTLIDIEGKVNDKVKSYNRYQLELAKRFNRVAGTTLDEVIDGQDVFIGLSDAKVLTGTQVERMAKDAIIFALANPVPEILPEEALKHGAAVVATGSNQWPNQVNNVLVFPGLFKGLLSANVQHVDYKLQANIATAIADVIKNPDRNHIVPGVFDAGVVESVTKAVKDSAK

SEQ ID NO: 11729 - protein, 301 aa, Zea mays
  unsure (1)..(301): unsure at all Xaa locations
RLFYKXLLIDNVEELLPVVYTPTVGEACHKYGSIYRRPQGLYISLKDKGKILEVLKNWPERSIQVIVVTDGERILGLGDLGCQGMGIPVGKLSLYTALGGVRPSAVEGATPDRLAFWECWPKRPKARCYACGRVCRGPTTWMGAPFVRAAPTDTSCVGGPCLPITIDVGTNNEALLNDDFYIGLRQRRATGEEYHELVEEFMAAVKQNYGEKVLTQFEDFANHNAFDLLEKYRESHLVFNDDIQGTASVVLAGLLAALKAGTGIAELIALEMSKHTGSPIEECRPKIWLMDSRGLIVASRK

SEQ ID NO: 11730 - protein, 314 aa, Glycine max
MMASPTSPRVLFLSLFVTLSMILHLSSARKLSESDPQLQFQYHRGPLLTGKISVNLIWYGKFKPSQKAIVADFITSLSSSKPLTAQPSVATWWKATDKYYKNSFPKLALSLGSQIVDENYSLGKSLTTNQILKLASKGPQRNAINIVLTSAEVAVEGFCSSRCGTHGSSVGARVNGKRYKFAYMWVGNSETQCPGQCAWPFHQPIYGPQNPAPLVAPNNDVGLDGMVINVASLLAGTVTNPFGNGYFQGPKEAPLEAGSACTGVYGKGAYPGYAGNLLVDPTTGASYNANGVNGRKYLLPALVDPKTSSCSTLV

SEQ ID NO: 11731 - protein, 475 aa, Oryza sativa (japonica cultivar-group)
MGNCFGSEEAEAAATVRAPAQGHHGRRQDSDQISNLAAEAAAPANRRSPIMAPPKALASMSSAAGHHSGMRSSSSMSSITTRSSSSSSNLPLGAAGGADVGVAGALYPEPEGRILEVPNLRIFTFAELRAATRNFKPDSVLGEGGFGRVYKGWVDERTMSPARSGTGMVIAVKKLNPESVQGLQEWQSEINFLGRLSHPNLVRLIGYCVEDRELLLVYEFMAKGSLENHLFRKGSAYQPISWNLCLRIAIGAARGLAFLHSSERQIIYRDFKASNILLDTHYNAKLSDFGLAKNGPTAGESHVTTRVMGTYGYAAPEYVATGHLYVKSDVYGFGVVLLEMLTGMRALDTGRPAPQHSLVEWAKPYLADRRKLARLVDPRLEGQYPSRAAQQAAQLTLRCLSGDPRSRPSMAEVVQALVEIERIRSRPKAASSREDASPRVPTRSGGHGHHHHHHSSRPRSGSDGARSGYPSPRVR

SEQ ID NO: 11732 - protein, 1090 aa, Ustilago maydis 521
MSSSTSAAIPPQANSDESNPLRTPPPPSSSTSSSSSSLSASTVSTPTPLAAGATSSSAVQSASASSPDPAVAFIPTPSSSSAPVTAQVSPPKITPATPSSSFSPPPPSSSSPSATVSVSSSPPTSSTIHHATVSDPTTEDIDMAVSTVSHPAPDLVLTDLGASSKRITPLASATIPHNSPQLEGTPLNPSQQQLALDALVPASALSTSSQPFSPISNSPQPMQPTKSSPATPTSLVKHSELTPSPRDRSAASGSASSSTPASSTTPALPPKVAPVMAGMGTLPPNVPPPSASASASTSAFSASDTLRAIPTNKNNPAFLNKLRSMVDDPNTDELIRWSPDGASFFVPNHVRFGDQVLPRFFKHNRFSSFVRQLNMYGFHKVPHLQQGALKHDSPQESELWEFSNPHFHRDHPDWLSKVQRKKGPRDDKDNHADREASATTGQELMHAGALMRTDFGMNNLGADANADGALQLASVLNAINAIKNAQTSISADLRHLQNSNQNLWQEAVESRQRAKRQQETINKILRFLAGVFGNQEDTETPVPGKKVSGKARAGKRVGVRPQQQQQQQQQHQQHQQQRSKSRLMIEDGNASSSSSHRGIQGLDLPLDQEEIEEMPYHLRFQEASNSDSPKVQSPSANLGASRFTQIGSPPSSSSAADFGRQLSEAVSTPGGSRRLSSQASNQVLNALASGEGNAWLASLFGASLANQGSKSTGPASGGGLKLDPHMVAALQQALASAGGVNSASDNTGDYFGSTTGAPADDGSSRFSAFPSSSSNASAVSSSNSAQANALGLDADALARFGASISHALVQSPARPNPNAGASNTQPTNYSVTSPSKGGSANLFDMGNDEVTSSGNNNQQLALSLSRATRDLQNTSSDVDQVQSSINSLIQGLQGIAGQAPASASASASDRAAVVPWQTTSGAAFDAAPATFGDASGSASVGNQFEAPSGTTPPSSTVDVGATSGTNAGMDDFDVDSFLSQFVDSSQAPGGGVTSPTPNNAYGESPSFAFSPATTAAFLHGAATSASDLPYAQQLTSKAESGTSSNSSSSRLNGKADSNAPKKRKPSTSGVELAVDVDMPDRPLKKSGRKA

SEQ ID NO: 11733 - protein, 339 aa, Oryza sativa (japonica cultivar-group)
MDAAAAAVSTLSALAVFASTLDHGAVRSVHGYKVYGRGGRRRWERWVEREFVLTPASCREVPAPVAPPRILPAEWRGRPAYREGQVVAAGAWRCILAFDSAAAPPRTPPPVLSPFLNPRLMCVPSLYNDLEKVFRFQNVEKIPKLMQCDSEEKLSSWDARDKSSDEVHASESDSDDDLQSGEEEKPTVQKQRRANKKHIASITLVDIAQYFHLPIREASRTLKIGVSILKRKCRQYNIPRWPHRKIKSLDSLIQDLEYVIDDGDDHDDTGDDVQQEKHKQTAEEKQEAIMALTRRKQMLETEKETIQQIPAMDLKVETKQFREDVFKRRYRAKKDLAND

SEQ ID NO: 11734 - protein, 167 aa, Saccharomyces cerevisiae
MQEFYSFSPIDENGNPFPFNSLRNKVVLIVNVASHCAFTPQYKELEYLYEKYKSHGLVIVAFPCGQFGNQEFEKDKEINKFCQDKYGVTFPILHKIRCNGQKQDPVYKFLKNSVSGKSGIKMIKWNFEKFVVDRNGKVVKRFSCMTRPLELCPIIEELLNQPPEEQI

SEQ ID NO: 11735 - protein, 428 aa, Pseudomonas aeruginosa
MADKKAQLIIEGSAPVELPVLSGTMGPDVVDVRGLTATGHFTFDPGFMSTASCESKITYIDGDKGVLLHRGYPIEQLAEKSDYLETCYLLLNGELPTAAQKEQFVGTIKNHTMVHEQLKTFFNGFRRDAHPMAVMCGVIGALSAFYHDSLDITNPKHREVSAHRLIAKMPTIAAMVYKYSKGEPMMYPRNDLNYAENFLHMMFNTPCETKPISPVLAKAMDRIFILHADHEQNASTSTVRLAGSSGANPFACIASGIAALWGPAHGGANEAVLRMLDEIGDVSNIDKFVEKAKDKNDPFKLMGFGHRVYKNFDPRAKVMKQTCDEVLQELGINDPQLELAMKLEEIARHDPYFVERNLYPNVDFYSGIILKAIGIPTSMFTVIFALARTVGWISHWQEMLSGPYKIGRPRQLYTGHTQRDFTALKDRG

SEQ ID NO: 11736 - protein, 379 aa, Psychrobacter sp. 273-4
MAAQNQSTKVLSGAGLRGQVAGKTALSTVGKSGSGLTYRGYDVSELADKCIFEEVAYLLLYGNLPTQSELDAYQTKLKGLRGLPQSLKEVLERIPAAAHPMDVLRTGCSMLGNLETEISFDEENDQADRMLAAFPSIINYWYRFSHDNVRIETETDDETIGGHFLHLLKGEKPNELHTKVMNVSLILYAEHEFNASTFTARVCASTLSDIHSCITGAIGSLRGHLHGGANEAAMDMIEGFSSPDEAESEMMAMLARKDKIMGFGHAIYSESDPRNVVIKGWAEKLAADVGDDVLYPVSVRCEEVMWREKKLFCNADFFHASAYHFMGIPTKLFTPIFVCSRLTGWAAHVFEQRANNRIIRPSAEYTGEELRPVPDMSAR

SEQ ID NO: 11737 - protein, 589 aa, Zea mays
  unsure (1)..(589): unsure at all Xaa locations
MCGILAVLGCSDWSQAKRARILACSRRLKHRGPDWSGLYQHEGNFLAQQRLAVVSPLSGDQPLFNEDRTVVVVANGEIYNHKNVRKQFTGTHNFSTGSDCEVIIPLYEKYGENFVDMLDGVFAFVLYDTRDRTYVAARDAIGVNPLYIGWGSDGSVWIASEMKALNEDCVRFEIFPPGHLYSSAGGGFRRWYTPHWFQEQVPRTPYQPLVLREAFEKAVIKRLMTDVPFGVLLSGGLDSSLVASVTKRHLVETEAAEKFGTELHSFVVGLEGSPDLKAAREVADYLGTIHHEFHFTVQDGIDAIEEVIYHDETYDVTTIRASTPMFLMARKIKSLGVKMVLSGEGSDELLGGYLYFHFAPNKEELHRETCRKVKALHQYDCLRANKATSAWGLEVRVPFLDKEFINVAMGMDPEWKMYDKNLGRIEKWVMRKAFDDDEHPYHPQHILYRQKEQFSDGVGYNWIDGLKSFTEQQVTDEMMNNAAQMFPYNTPVNKEAYYYRMIFERLFPQDSARETVPWGPSIACSTPAAIEWVEQWKASNDPSGRFISSHDSTAIDHTXAVSRRWPTAAATXAANGTVNGKDVAVAIAV

SEQ ID NO: 11738 - protein, 453 aa, Geobacter sulfurreducens PCA
MPDYDTQTLRDWDRRHIWHPFTQMKEWEESEPVVIVEGEGSWIIDSEGKRYLDGVAAIWTNVHGHCRREINEALKAQVDRLEHSTLLGLTNDRAVVLAKRLAEIAPPGLCKVFYSDNGSTAVEVGVKMAFQFWRHEGKPEKSRFISFTSAYHGDTLGAVSVGGIDLFHGVFRPLLFPTIQAPAPYCYRCPMGRDTPAACGMECLTELERIMESHAGEVAGLVIEPLVQGAGGMIVQPEGFLKGVRELCDRHDILMIADEVAVGFGRTGAMFACGREGITPDIMALSKGITAGYMPLAATLATQQVYDAFLGEYREMKTFFHGHTFTGNPLGCAVALASLDLFESDRLLGKLPNKIKLLQEKLKGLIELEHVGDVRQCGMIAAVELVRDRATKEPFDWEERVGVRVCLEARTHGVFLRPLGNVIVIFPPLAITAEEIDFLVDGLEKSIHTVTGG

SEQ ID NO: 11739 - protein, 394 aa, Zea mays
MALSIYTPTSSSLVPPSIQEVRLTSRPPKPATFSLRRPHLAARAAAGNAPTSPVREVVTELDAVAGFSEIVPDTVVFDDFERFAPTAATVSSSLLLGITGLPDTKFKSAIDTALADGECNALEKAEDRMSCYLTKALANVGAELAHQVPGRVSTEIDARLAYDTQGIIHRVHELLNLYNQHDVSTDRLLFKIPATWQGIEASRLLESEGIQTHLTFVYSFAQAAAAAQAGASVVQMFVGRLRDWARHHSGDPEIDEALKNGEDAGLSLAKKVYAYIHRNGYKTKLMAAAIRNKQDVFSLLGIDYIIAPLKILQSLEESVTDPDVKYGYVPKLTPAIGKTYNFTEEELVKWDQLSLSAAMGPAAEELLASGLEGYVNQARRVEELFGKIWPPPNV

SEQ ID NO: 11740 - protein, 482 aa, Streptomyces avermitilis MA-4680
MSILNDVPKQLFIGGTWADAADGATMPVDDPATGEILCHVADAGPKDARLAADAAVEAQDGWARTAPRERSEILRRAYEIIVSRTGELALLMTSEMGKPLAEARGEVAYAAEFFRWFSEEAVRIDGGYGVLPDGRNRMLLMRRPVGPCLLVTPWNFPLAMGTRKIGPAIAAGCTMVLKPAPQTPLSSLALAGILKEAGLPDGVLNVVTTSRAGEVVEPLLTGGRIRKLSFTGSTRVGRLLLAQCADAVVRTSMELGGNAPFIVLDDADLSAAVDGAMTAKMRNMGEACTAANRFFVHRSVADEFGRRLAERMGALVVGPGTRDGVDVGPLIDEAGRAKVEELVADAVERGARVLVGGVAPDGPGRFYPPTVLADVDPGSRLMETEIFGPVAAILVFDDEDEVVRRANDTPWGLVGYVFTQGLDRALRVSERLEVGMVGVNTGLVSNPAAPFGGVKQSGLGREGGRVGIEEFLEYKYLAVPLR

SEQ ID NO: 11741 - protein, 441 aa, Glycine max
  unsure (1)..(441): unsure at all Xaa locations
MSGMKVAKGRILVGKYELGKTIGEGSFAKVKFARNVQNGNYVAIKILDRKHVLRLNMMEQLKKEISTMKLINHPNVVRIHEVLASKTKIYIVLELVDGGELFNKIAKNGKLKEDEARRYFHQLINAVDYXCHSRGVYHRDLQPENLLLDSNAILKVTDFGLSTYAQQEDELLRTACGTPNYVAPEVLNDRGYVGSTSDIWSCGVILFVLMAGYLPFDEPNHATLYQKIGRAQFTCPSWFSPEAKKLLKRILDPNPLTRIKIPELLEDEWFKKGYKPTTFVEEEDVNVDDVAAAFNDSKENLVTERKEKPVSMNAFELISRSQSFNLENLFEKQTQGLVKRETHFTSQRPANEIMSKIEEAAKPLGFNVHKRNYKMKLQGDKSGRKGHLSVATEVFEVAPSLHMVELRKTGGDTLEFHKFYKNFSSSSGLQDIVWHDTEGKK

SEQ ID NO: 11742 - protein, 44 aa, Triticum aestivum
MSDTDEHHFLSKADSGAFKTYPHQAVAIRKGGHIVINARPCKVV

SEQ ID NO: 11743 - protein, 302 aa, Triticum aestivum
  unsure (1)..(302): unsure at all Xaa locations
MDSLSPVRGSPCFPAGFPGNLFPFALFLXSPVPTFKRILKAKSTEQFDGLPYLLSLLNCFICLWYGLPWVXDGRLLVATVNGTGAAFQLAYISLFFIYADSRKTRLRMVGLLALLVCAFALVAHASIAFFDQPTRQQFVGAVSMASLISMFASPLAVMGVVIRTECVEFMPFYLSLSTLLMSASFAVYGVLLRDLFIYLXTGLELSWEQRSWHSTLTTAGNGDARIHLRRCLPDQTSSDQFSVLAWLERAGVGFCRRELYAPALFSLVDAESACTDLLAYASVYMLLKCHSFKKKKKAAALR

SEQ ID NO: 11744 - protein, 472 aa, Triticum aestivum
MVPREHGDEAIVADGHGKEEEVGVMGVSSGGADGDEEQHGGGGGKFSVTSFLWHGGSVWDAWFSCASNQVAQVLLTLPYSFSQLGMLSGILLQLFYGFLGSWTAYLISVLYVEYRSRKEKEGVSFKNHVIQWFEVLDGLLGPYWKAAGLAFNCTFLLPRARVQLRARASNIYYINDRLDKRTWTYIFGACCATTVFIPSFHNYRIWSFLGLGMTTYTAWYLTIAAAVHGQVPGAKHSGPNSLMLYFTGATNILYTFGGHAVTVEIMHAMWKPRKFKYIYLVATLYVFTLTLPSASTMYWAFGDALLTHSNAFSLLPKSGWRDAAVILMLIHQFITFGFACTPLYFVWEKAIGMHHTGRVLRRALARLPLVLPIWFLAIVFPFFGPINSAVGALLVSFTVYVIPALAHMITYRSAHARENAVEQPPRFVGRWTGTYVINAFVVVWVLVVGFGFGGWASITNFLRHHRHHSHRL

SEQ ID NO: 11745 - protein, 219 aa, Candida albicans SC5314
MSSDKSNLLKKYKIVFLGDQSVGKTSLITRFMYDTFDETYAATIGIDFLSKTMYLEEGKTIRLQLWDTAGQERFRSLIPSYIRDSHVAVICYDITNKKSFDNLDKWIKDVKLERGDDVIIVLVGNKSDLASDKRQVSLDDVENLQIKIGAKFFIETSTKANHNVKLLFKKIAQSLPDFNQDSNDKSNDNNNNNNNNQSETIDITIDNTAPNPQGTSTCC

SEQ ID NO: 11746 - protein, 499 aa, Methanococcoides burtonii DSM 6242
MVDKCSNYMGRIAGFFNLSPSSISQIRIFNEMEVRGEYEAIIYTGDTIHNVHSASEIQFISLNDAMIGFDSLKASSPLSSSSDKFELVGDIDIYNSDEFACEFHCGNVENMSILTRFLQDTFGLEKCSDDEMFQRFDSSLKAIRGVYAIACHIGDKVFLARDLIGVKSLWYDVSSGFAFASEKKFLEMAGLHEVVELDPRHILCYDFENDIIKSYDREFLQGLAEHQGSFVEIRNGFLSLLKEAVSKRVPDEDFGVMFSAGIDSTILALLCKGFAEAKGVKCNYYTVGLSGQVPSPDIACARKLADELELELNVHEIGLDTVEEYLSTVVPLIEDATVPKTGVALTMYAACRAAKEDGINVLFAGAGADELFAGYNRFKSSESVNEDCIRDIMEMHKVNTYRDDTVAAFTGTIVRYPYLDENFVEYALAIPKEYKISDEMNKIVLRKAGEELGLPKYVVERGKKAAQYGSSFDQALKKLAKRAGFANKTDYINSFQERR

SEQ ID NO: 11747 - protein, 534 aa, Glycine max
NSARVQSLVSHLRLIVLLLSVSLGNSASLQENFVQCLNLNSDRTFPFYSSIYTPKSPSFTSILDSSAQNLRLLVPSTPKPEFIFTPSRDSHVQAAVICSKKLGIHIRVRSGGHDYEGISYVSEIESPFIVVDLVKLRGIDVDVKSNTAWVQAGATTGEFYYRIYEKSSVHGFPAGLCTSLGIGGHITGGAYGAMMRKYGLGVDNVLDAKIVDANGRILDREAMGEDLFWAIRGGGGGSFGILLWWKIKLVSVPPTVTVFTVTKTLEQGATKILHKWQEVAPYIDENLFIRVIIQPSSDARNKTQRTIATSYNALFLGGARTLLQVMKTSFPELGLTIKDCLETSWIKSVLYIAGFPSDTPPEVLLKGKSTFKNFFKAKSDFVREPIPETGLEGLWQRLLVEDSPLMIWNPYGGRMSQFSESETPFPHRNGTLYKIQYLSLWQEGDKNAAKHIDWIRKLYNYMGPYVSSLPREAYVNYRDLDLGINTKNSTSYIQASAWGYRYYKNNFDRLVKIKTKVDPENVFRHEQSIPPLPL

SEQ ID NO: 11748 - protein, 320 aa, Candidatus Blochmannia floridanus
MIKKIGVLTSGGDSPGMNAAIRGVVRAGLSEGIEVYGIYDGYLGLFQNRMMLLSYCSVSDIINKGGTVLGSSRFPELKKDMIRSVVMNNISKSHLDALVIIGGDGSYIGARRLSDLGCPCIGIPGTIDNDVAGTDYTIGYFTALETIIEAIDRLRDTSSSHQRISIVEVMGRYCGDLTISAAIAGGCEFVIIPELKFQMQDLVDKIKLNISKGKKHAIVAITERICNVFDLAQYIENETGKETRATVLGHIQRGGKPVAYDRILASRMGAYSIELLLKGYGRHCIGIENEKLVHHDINDATKYMRRSFRQDLLTTAKKLC

SEQ ID NO: 11749 - protein, 250 aa, Brassica napus
MTKSYPTVSEDYQNAIEKCKRKLRGLIAEKNCAPIMVRLAWHSAGTFDCASRTGGPFGTMRFDAEQGHGANSGIHIALRLLEPIREQFPTISFADFHQLAGVVAVEVTGGPEIPFHPGREDKPQPPPEGRLPDATKGCDHLRQVFTKQMGLSDKDIVALSGAHTLGRCHKDRAGFEGAWTSNPLIFDNSYFKELLSGEKEGLLQLVSDKALLDDPVFRPLVEKYADDEEAFFADYAEAHLKLSELGFADA

SEQ ID NO: 11750 - protein, 439 aa, Ustilago maydis 521
MESQLANLHLDGGSTADLKQGSRPSHAQASHGNRHVHPTNSSLRPLAPSSSIASNMGINMGVNMQHFNRLAASSTGLTNPNSIAQGMSRAAQQPLNGSRPSTQQQPTQAHIKSRPPSVAGGLNAAAGPSYRPAAPAAQSTKQPASAGSAVASVDLGRYDGGLERDEARGRRGTMQFDPLTLSSADAGKQHPPTRVWSLKDFEMGRPLGKGKFGRVYMVRTRAAPNKGYIIALKCMYKNELVENKVEKQLRREIEIQMNLRHPHILRLHGYFHDEGRVFLMIEFAGRGELYKLMNKLHDRRFEEKVAATYIAQMADALSYLHSKHVIHRDIKPENLLLGIKGDLKIGDFGWSVHAPGNRRQTLCGTLDYLPPEMVNGEQHDKAVDLWALGVLCYEFLEGVPPFEELENAPAGTYKRINNIDFKIPRHFSPEAADLTTGYP

SEQ ID NO: 11751 - protein, 143 aa, Zea mays
MAMAYKMATEGMDVKEECQRWFMEMKWKKVHRFVVYRIDERSRAVLVDRVGGPGEGYEELVAALPGDDCRYAVFDFDFVSVDNCQKSKIFFIAWSPAASRIRAKILYATSKQGLRRLLDGVHYEVQATDPSEMGFDVIRGRAQ

SEQ ID NO: 11752 - protein, 488 aa, Glycine max
  unsure (1)..(488): unsure at all Xaa locations
MESRFKSNPQLRRGLCCANDDKQQERSPSVIVIGGGMAGIAAARALQDASFQVILLESRERPGGRIHTDYSFGFPVDLGASWLHGVCPENPLAPLIGKLGLPLYRTSEDNSVLYDHDLESYALFDMDGNQVPQELVTKIGKIFGAILEETNNVREEFSEDMSILRALSIVFERKPELRLEGLSHKVLQWYLCRMEGWFATDADTISLKCWDQEVLLPGGHGLMVRGYQPVINTLAKGLDIRLGHRVTKIVRQYNEVKVTVENGKTFVADAAIVAVPLGVLKAKSIKFEPKLPDWKEAAISDIGVGIENKIILHFKNVFWPNVEFLGVVAETSYGCSYFLNLXHKAMGRPVLVYMPAGQLAKDIEKMSDEAAANFAFMQLKKILPDASSPIQYLVSRWGTDINTLGSYSYDAVGKPHDLYEKLRVPVDNLFFAGEATSMLYTGSVHGAYSTGMMAAEDCRMRVLERYGELDLFPPVGDVSVIPLQISRL

SEQ ID NO: 11753 - protein, 358 aa, Triticum aestivum
  unsure (1)..(358): unsure at all Xaa locations
MAGEGGSGGERGKDPLEGVRAIVLKPSESLDESRFTKIAGADFNDAGLGLDGLLGSLASTGFQASNLGDAIDVVNQMLDWRLSHEKPTEDCDEAELDPKYRESVKCKIFLGFTSVDVIVTTAGGIEEDLIKCLAPTYRGEFSLPGALLRSKGLNRIGNLLVPNDNYCKFENWIMPLFDQMLQEQSTENVWTPSKVIARLGKEINDESSYLYWAYKNNIPVYCPALTDGSLGDMLXCHAVRNPGLIIDIVQDIRLINGEAIHASPRKTGAIILGGGLPKHHICNANMFRNGADYAVYINTAQEFDGSDSGAQPDEAVSWGKIKGSXAKPVKVHCDATIAPTLLVAATFARRSHGANSTN

SEQ ID NO: 11754 - protein, 386 aa, Magnetospirillum magnetotacticum MS-1
MIDTTVHSASPGFEHKEDLESGTRAAAQAGVVAIFEMPNTKPSTTTADAILDKLARAKGRAWVDHAFFIGAASDNVDHLAQWERIPGCAGIKVFMGSSTGNLLVADDETLGRVLAQGFRRVAVHCEDEGRLIERKHVAEEGAHPRVHHLWRDEETALMASKRLIALAETARRRVHVLHVTTAEEMEFLAGHKDVATVETTPQHLTLAAPECYERLGTYAQMNPPIRGTRHRDALWKAIADGTVDVLGSDHAPHTREEKDKPYPQSPSGMTGVQTLVPLMLDHVNQGRLSLERLVDLTSAGPARIYNIAGKGRIAVGYDADFTIVDMKAERIITNDWIESRCGWTPFDGRKVTGWPVATIVRGSTVMRDGQLLGQASGEPVRFQECP

SEQ ID NO: 11755 - protein, 217 aa, Cryptomeria japonica
MVRGKVNLQRIQNPVNRRVTFSKRKAGLLKKAGELSVLCEAEICSIIFSPTGKLFEFASHSMNRIIGKYKKNCASIGHHIQLQEHLETLRMELENLRIETTHLEKTCKHMNGEDLDFLNFKELQKLEKKMSLSARKIHLRKDKILVENVGSLKSKEKLLELENAEMDKKIGRSHKACHLNINMMDEVNSKLETEASTRQDCLKLTLISRNFHDDNFC

SEQ ID NO: 11756 - protein, 504 aa, Sphingomonas sp. LB126
MMESTGNAAIFEQARARIARPFGHFINGLWEAGSGEPIAVVNPATEQPIGSIAAGGEAEVDRAVAAARQRFESAEWTRMPAAERERLLLRLADLVERDRDELAAIETLDNGMPFAPARMMAVGSAISAIRYNAGWARRMTGEEAPVSVPGRWHGYTSREPLGVAALIVPWNAPFAITCNKVSAALAAGCTVVLKPAELAPMSGLRLAELVQEAGFPDGCLNVVTGLGAQAGAALVRHPGVDKISFTGSTATGQSILRETAGRLTRVSLELGGKSAVLVFPDADLEKAIPAVAMGIFGNSGQVCAAGSRLFLHDSVFDRFVTGLVDFAEKLMVGPGDQPGVALGPLISAGQKERVMGYIAAGEAEGAQIATRGSAPDEPGYFVKPTIFVDTRPDMRIVREEIFGPVLSVMRFSDDNLENLARQANDSIYGLSAYVWTRDLSTAHAMARYLRAGSVKVNGSGMEFALPFGGFKQSGIGRENGPRGGGSLYRKEVGNDRLVMVWTAL

SEQ ID NO: 11757 - protein, 96 aa, Glycine max
  unsure (1)..(96): unsure at all Xaa locations
PEYGVHLGLAANNNSPSRSNPQAHAENLICXGANTHSNAQNTAGVITMAREGVRDFDTPTKELSPILACKPGLNIRGETNLASGIQAAQQAIKSLR

SEQ ID NO: 11758 - protein, 372 aa, Zea mays
  unsure (1)..(372): unsure at all Xaa locations
RVSQGKPDEIEESISMVEILAVQLAXREAELLLXKEEFTKFAKSLKQASEDAKRIVEEERANAHTEIETAKGAVQRVQQAVQEHEKMSQNTGKQDMEELKKEVREARRIKMLHQPSKAMDLENEIRILRNTFAEKSKDCVSLLKELEMHKRLKENGTIPSFDLEGLQCLGSMLRIVGLSGTHMDLSNISIQWFRIHPKESNKEIISGATRPVYALEPHDVRRYLQAEIDCXGEIAVAKTAGPVDPVAGLVDYVETLVRKPETEFNVVVLQLNGIDLPKESVHVLNVGRLRMRLTKGKSVVPKEFYSSSMQLCGVRGGGEAASQAMFWRPRNDLSLVLAFESTRERNTAIMLARRFAVDCNIILAGPGDKTPW

SEQ ID NO: 11759 - protein, 501 aa, Chorispora bungeana
MAIPMPTRQLFIDGEWREPILKKRIPIVNPATEEVIGDIPAATTEDVEVAVNAARRAFSRNKGKDWAKAPGALRAKHLRAIAAKVTERKSDLAKLEALDCGKPLDEAVWDMEDVAGCFEFYADLAEGLDAKQKAPVSLPMENFKSYVLKQPIGVVGLITPWNYPLLMAVWKVAPSLAAGCTAILKPSELASVTCLELADICREVGLPPGVLNVLTGYGAEAGGPLASHPGVDKIAFTGSFATGSKVMTAAAQLVKPVSMELGGKSPLIVFDDVDLDKAAEWALFGCFWTNGQICSATSRLLVHENIAPQFIEKLVKWSKNIKISDPMEEGCRLGPVVSQGQYEKILKFISTAKSEGATILHGGSRPEHQEKGFFIEPTIITDVTTSMQIWREEVFGPVLCVKTFGSEDEAIELANDSHYGLGAAVISNDTERCDRVSQAFEAGIVWINCSQPCFTQAPWGGVKRSGFGRELGEWGLDNYLSVKQVTLYTSNEPWGWYKSPN

SEQ ID NO: 11760 - protein, 481 aa, Burkholderia cepacia R1808
MMKIQNLIGGRHCDASTGRTFDKLAPATGDRICTVPASSADDVDRAVRAAHDALHDDAWARAGGAARARWLYRLADLVERESEALESLLAVEQGRPPAEMRMMDLPMTIDTLRYFAGWADKLEGRTIPTDGFMGRPTLSYTRRAPVGVAGQIVPWNAPLMIAVWKLAPALAAGCPVVIKPSEDAPLAVARLGKLACEAGLPAGVVNIVHGMGAEVGAALVAHPLVSKISFTGSTEVGRTIACDAARTFKRVTLELGGKAAQIVFADADLDRAIPSLVAGMFANQGQTCAAGSRVLAHRSIADALEARLADAARTIRVGPPTEAGVQMGALINPRHLARVRAHVAAALAEGAVMLAGDEQVPPRGCFMRPTILGGVHPGMRIAREEVFGPVGMVMPFETEDDAIRIANDTPFGLSASVWTQDVGTAHRVAERLDVGAVAINAWSPIDARLPWGGTRQSGIGRDLSKAALDSYLEEKIVTAAL

SEQ ID NO: 11761 - protein, 441 aa, Burkholderia cepacia R1808
MSSAAAGHTTPTVIIARGDGNYVYDVEGHRMLDGVGGLWNVNVGHNRPEVKAAIARQMDELSYYQTFDGVAHPRVYDLADRLCAMFEQEDMQRVMFGSGGSDAIETALKMARQYWVAAGEPSRTKFLSLRNGYHGVHMGGTSIGGNGVYHYNHGPLLPGCVLLDTPWLYRNPWNCDDPDQLVEHCIRQLEDTIAFHGQQTIAAFVAEPVQGAGGLIVPPASYWARVRNVCDRHGILLIADEVVTGFGRTGSMLGSRGWGVAADILCVAKGISAGYVPLGATLYNGRIAQAIEHGAGFSHVVMHGYTYSGHPLACAASLAVLDIVEAEDLPGNAARMGQRLLEQLLPLTRDFETVGDVRGKGLMLALDLVTDKASRTPLDPGKGFAARVADAARKRGVLVRAIANKIVMSPPLTLQPKETDLIAHALRDALQECCADARAIA

SEQ ID NO: 11762 - protein, 493 aa, Ralstonia solanacearum GMI1000
MALTFDQLRHTGLIRTDNLIDGRWSAGADGARYAVTDPATGSIIAQVADSSAADARAATDAAARALPAWRDTLPAERAAILRRWHAAIVANADALGRLISLEQGKPFAEGRGEVMYGASYVAWFADEATRIYGDLIPQQQRGKRMSAIKEPIGIVAAITPWNFPLAMIARKIAPALAAGCTVVAKPAEDTPLTALALAQLAQEAGLPPGVLNMIAASRERGVAAVADWLQDGRVRKITFTGSTPVGKHLARESAGTLKKLSLELGGNAPFIVFDDADLDAAIAGLLSAKFRNGGQTCVCPNRVYVQAGVYDRFAAMLAARVSALKVAPATDPDAQIGPMINARAVDKIERHVQDAVAHGARVLAGGKRLPEVGAHFYAPTVLADAHPGMALCGEETFGPVVPLFRFTDEAEAVQAANDTPFGLAAYFYSQDVRRIDRVAHALEAGIVGINEGALASEAAPFGGVKESGYGREGSKYGLDDYLSIKYLCQGGLA

SEQ ID NO: 11763 - protein, 687 aa, Zea mays
MARGLGAAPVSSCLALGAAAAVLLVAAALPSPASGVDVTAVLSAFPNFADFARLLASTPVASELSGRSSLTLLAVPNANLPQSPSAFVASAGADIADVLRYHVLLEYLSPFDLARLSPSGKLVTTLFQTTGRAPSDFGAVNLTVGGNSTVVVRSPAPSPGSNATVLGAVTAVPYNLSVLAVGGLIIPSGFDLAASESRPPPPVNITRVLTDARGFNVAASMLQASGVASEFEADEHGAGITVFVPTDDAFAGLPATDRLQSLPAERKAVVLRFHVLHSYYPLGSLEGPRRDLAVDPAAARAALVTCGGLCPGLNTVLRELVVGLQELYGVRHEVAEVVSSRDSYSKAPKSDVQCKNRIDTLKKKYKVEKAKHDSDWRYFDRLDDLLAPVLLKPNSSSSSAAAATAAAAARSAGPMVPPRINFPQRTRTPLHSSAGAKWRMPSPLPQPSASSDSSDGFPPSAVANGKRQRVEEPAAAAADNGAESSVSRAQGLRELAQAIRRLGEVYERVESAKRDQELRMERERLDSARQLEEQRVQFSTSMPRSSRITRTAQAPPGAMTTAATRTRKLRRMRKTKRKRASDCSPLQQWNAGAMFAKFSNITRVNGSIAIDTGIVQASITRTVFDQNPVAVFAVSKVLLPKEMFGRGDSGNTAMAPPSVAMAPRDAGSEKTPQTRLSSPPDLHSEDS

SEQ ID NO: 11764 - protein, 411 aa, Triticum aestivum
MGNEMSPLQKHRAEYRPELPPWLQGTAVKVEYGDAAIAADGADAHVIRRAFPHTYGQRLAHFLPKTANAPDATVITEHPAVRVGVVFSGRQSPGGHNVVWGLYNAINSHNPSSELIGFLGGTDGLFAQKTLEITEEVFSSYKNQGGYYMLGRTRDQIRTTEQVKAAMTTCQALKLDALVIIGGVTSNTDAAQLAETFAESKCSTKVVGVPVTLNGDLKNQFVETTVGFDTICKVNSQLISNVCTDALSAEKYYYFIRLMGRKASHVALECALQSHPNMVLLGEEVAASKLTISDITKQICDAVQARAEKDKYHGVVLIPEGLVESIPELYALLQEIHGLHDKGVSIENISSHLSPWASALFDFLPPFIRKQLLLHPESDDSAQLSQMETEKLLAQLVETEMNKRLEEGLTT

SEQ ID NO: 11765 - protein, 443 aa, Brassica napus
  unsure (1)..(443): unsure at all Xaa locations
RKRTTPASRTRVGNYEMGRTLXEGSFAKVKYARNTVTVDIXSAAIKILDRDKILRHKMVEQLKREISTMKLIKHPNVVEIIEVMASKTKIYIVLELVNGGELFDKIAQQGKLKEDEARRYVHQLINAVDYCHSRGVIHSDLKPENLIPDANGILKVSDFGLSAFSLQVRGDGLLHTACGTPNYVAPEVLSDKGYDGAAADVWSYGIILFVLMAGYLPFDEPNLMTLYKRICKAEFSCPSWFSPGAKEVIKRILDPSPITRISIAELLEDEWFKQGYKPPSFGQDDEDITIDDVDAAFSNSKESLVTEKKAKPESMNAFELISSSNSLENLFEKQAQLVKKETRFTSQRPASEIMSKMEETAKPLGFNVRKDKYKIKMKGDKSGRKGQLSVATEVFEVAPSLHVVELRKTGGDTLEFHKFYKNFSSGLKDVVWNTDGAPEEHKA

SEQ ID NO: 11766 - protein, 116 aa, Gossypium hirsutum
MSLKLACVVVLCMVVGAPLAQGAVTCGQVTNSLAPCINYLRGSGAGAVPPGCCSGIKSLNSAAQTTPDRQAACRCIKSAAAGITGINFGLASGLPGKCGVNIPYKISPSTDCNRFV

SEQ ID NO: 11767 - protein, 372 aa, Streptococcus mutans
MAETNGLKDMIACDTRISAIKDNKLSYAGYDIADLMDNKTRFEEVIYLLWNLHLPTAIELKQFEEKLRKNYAISDAIEQCILIQSRQHLHPMSVLRSTVSLLGVYNLKAEERSVEATYDQSIQLMAKIPTIIATFARLRQGLSPIAPRKDLGFAANFLYMLNGRLPSELEILAMNRALVLHAEHELNASTFAARVCASTLSDIYSCVTTAIGTLKGPLHGGANERVFDMLREIREYGDVDSYLQEKLNSKEKIMGFGHRVYQTQDPREKYLREMARELTKGTEHDIWYQLSKKVEMCMKQKKNLIPNVDFYSATVYHVLGIDSSIFTLIFAMSRVSGWIAHIQEQQKNNKLIRPRSHYTGMRKLRYIPIERR

SEQ ID NO: 11768 - protein, 393 aa, Streptococcus mutans
MAEKVSFEEGKLQVPDKPVIPYIEGDGVGQDIWKNAQIVFDKAIAKVYGGHKQVIWREVLAGKKAYKETGNWLPNETLEIIKTHLLAIKGPLETPVGGGIRSLNVALRQELDLFACVRPVRYFKGVPSPLKHPEKTAITIFRENTEDIYAGIEWNAGTAEVQKVINFLQDDMQVKKIRFPKSSSIGIKPISIEGSQRLIRAAIEYALANNLTKVTLVHKGNIQKFTEGGFRKWGYELAKREYAAELASGQLVVDDIIADNFLQQILLKPERFDVVALTNLNGDYASDALAAQVGGIGISPGANINYQTGHAIFEATHGTAPDIAGQDLANPSSVLLSGCMLFDYIGWSKVSDLIMKAVEKAIANGQVTIDFAKELGVEALTTCQFSEVLLTYL

SEQ ID NO: 11769 - protein, 198 aa, Brassica rapa
MSASRFIKCVTVGNGAVGKTCLLISYTSNTFPTDYVPTVFDNLSANVIVDGNTINLGLWDTAGQEDYNRLRPLSYRGADVFLLAFSLVSKASYENVSKKWVPELRHYAPGVPIILVGTKLDLRDDKQFFVEHPGAVPISTAQGEELKKLIGAPAYIECSAKTQQNVKAVFDAAIKVVLQPPKNKKRKKRKSQKGCSIL

SEQ ID NO: 11770 - protein, 153 aa, Zea mays
  unsure (1)..(153): unsure at all Xaa locations
MLLIVWSTTREDLSTQLSPIEAVNFQSEKMQQRKTTAAAAGRPSGTDGSDFSYRMVVDSRYTKVTKGRSRLRLLILVQATIYXLGLSCAFMTSTKNEERNTLGIASASIGLLFDSLXDFGCRRSRVNLLRLYTVPFTGGPWVFSLVFWLLGAD

SEQ ID NO: 11771 - protein, 175 aa, Triticum aestivum
MAPTVMASSVTSVVPFQGLKSTAGLPVSRRSNGASLGSVSNGGRIRCMQVWPIEGIKKFETLSYLPPLSTEALLKQVDYRIRSKWVPCLEFSKVGFIFREHNASPGYYDGRYWTMWKLPMFGCTDATQVINEVEEVKKEYPDAYVRIIGFDNMRQVQCVSFIAFKPPGCEESGKA

SEQ ID NO: 11772 - protein, 96 aa, Brassica napus
  unsure (1)..(96): unsure at all Xaa locations
MASSMLSSAAVVTSPAQAAMVAPFTGLKSSAAFPVTRKSNTDITSIASNGGRVSCMKVWPPVGKKKFETLSYLPDLTDVELAKEVDYLLRXXWIPC

SEQ ID NO: 11773 - protein, 506 aa, Zea mays
MAASAKGRLVPVLAVAAALAAVLLYRAPFSKSLGGEGCSLLPHDHFWIASDRVVTLGRVGPAAVEVKGGLINAIAVGDYRSFVLRRPLLDYGDAVIMPGLIDVHAHLDEPGRAEWEGFSNGTRAAAAGGITTLVDMPLNSFPSTVSEETLKLKLEAARDKLYVDVGFWGGLVPENAFNPSALEGLLKAGVLGLKSFMCPSGINDFPMTNSTHIEEGLVTLAKYKRPLLIHAERIPEAEDHDLQDDELDPRSYMTYLKSRPPSWEEAAIRDLQRAMKDTELGGRSEGAHIHIVHLSDAKTSLELMKDAKRSGASLSIETCPHYLAFSSEEVPDGDTRFKCSPPIRDDTNRENLWKALLDGHIDMLSSDHSPSTPDLKLMEEGDFLRAWGGISSLQFVLPVTWSYGRKYGITLNQLASWWSERPAKLAGQKNKGAILPGYHADIVVWKPETEFQLDNNHAIYHKHQNISAYLGKQLSGKVLSTFVRGNLVFAEDKHANAACGVPILAK

SEQ ID NO: 11774 - protein, 346 aa, Rhodopseudomonas palustris CGA009
MKAAVFEKTGERLVVRDVAAPALGDNELLLKVAFTGICGSDLHAAETPGMLQSGTVMGHEFTGEIVQSTASDWPVGARVAANPYWLCDACAAGGSCSGGGDAACANGSFMGFRPDLPGAYADYVRIRAGQAIRLPDKVSLRDGALMEPLAVARHAVDVCGPMQGADVLVIGGGPIGLGVVLMARDAGAARVVVSEPDPNRRACALEVGAVAAIDPIAEDLPTALGRLGIGAPGIVFECVGAPGFLQQTIDVMALRGRAVIVGVCMTEDRVLPRAAIRKEATLKFVLGYTMADFHHVSRYLEEHAATAAAMISRVVSLSELPEIFDRLRAEKSLIKVLVRPDQGSGT

SEQ ID NO: 11775 - protein, 1258 aa, Magnaporthe grisea 70-15
MAENENSGGIKDGSKDEGIGLEAFAAALVTGIAVFAVQITIFLLFRNKLARIYKPKTFLVPERERTDPPPASPWSLATSLLKISDRELIKKCGLDAYFFLRYLRMLLVIFIPIAFIVIPILVPINYVDGLGHEVVRDVKDNPPDVPRGLDTLAWPNLKPKNHQRRWAHLVMALAVIGWVCYIMFLELRIYIKVRQDYLTSAEHRLRASANTVLVSSIPEKWLTEDGLRGLFDVFPGGIRNIWITRDFTKLLEKVRKRDEIHDQLEAAQTELIREAKRRYLKKRIAEEKKGQGDKGRHRPTKDEIQKRQDEEDAEARLRAQQGGISAGTHEEVPHIDTAVEQDQRRNSYVPPEQDNADGSSKEAKGLGLGFIGKGIKGGVNVVGKAGHTLVGGAKTIQKGVDGQLEHTGGFGFLPGESRGPGSPVPPRPVTRGSDRRHRAAPMSSDIREETKKTSFDSDSGYQGHSPSGSKDEDLMVAGGTRPSSAQTRGNTTRKAMNLDGMIVNENNSWWKFWKAPSGGYASPVPQGREEDEFPLTGSSSSQKQKKTLWQRLLASLPLIGGEDIAPVEYPVSASEFAYSNDREDGAEWKKWLKESKRPTHRLPNFEWTPSWLPGLPLINKKVDTIYWARGELARLNMEIEIDQKHPERYPVMTSAFIQFNNQVAAHMACQSVTHHVPRQMTPRVVEVAPHDVIWENMAITWWDEWLRFAIVLALIVGMVILFIFPVVLSSGVSQIDTLVEAAPLLSFLSRNEKVYNFLKLVSGVLPAIILAIILAVVPLIFNYLAKLQGAKTGAQRSESVQVYYFAFLFFLLFLVVGLSTSAVSTLTAFFSANDAVNQVVGIPELLAKNLPKSANYFFTYMILQALSVSSGTLMQIGTLIVWYILGRLLDNTARAKWKRQTELPNVNWGSFFPVYTNFACIALIYSIVAPIIAIFAIITFSLLWLAHRYNMFYVTRFQTDTGGVLFPRAVNQLFTGLYVMELCLIGLFFLQTDERGNLVGFRQAIVMIVAMVITVGYQILLTKSFSPLFRYLPITFEDEAVLRDEAFQRAQDRRLGLVNDDPEDGDGDEAGMLRGDASGATREEIEMRRLSAKRRSVTGSAHGSKLGMLNPVAGIRHAGTWAVRAGKQIEHATLGKAEKNLKTAAQYRKERRMKDLEAQRAIGDALYGGFHDEIEDLTPDERDVLVREAFKHEALRSRRRAIWIPQDEIGVSDDEIYRTQSFSEYIWISNEGTALDSKTRVIYGRAPPDFSEMDLISL

SEQ ID NO: 11776 - protein, 449 aa, Pseudomonas putida
NMPEHAGASLASQLKLDAHWMPYTANRNFLRDPRLIVAAEGSWLVDDKGRKVYDSLSGLWTCGAGHTRKEIQEAVAKQLSTLDYSPGFQYGHPLSFQLAEKITDLTPGNLNHVFFTDSGSECALTAVKMVRAYWRLKGQATKTKMIGRARGYHGVNIAGTSLGGVNGNRKLFGQPMQDVDHLPHTLLASNAYSRGMPKEGGIALADELLKLIELHDASNIAAVFVEPLAGSAGVLVPPEGYLKRTREICNQHNILLVFDEVITGFGRTGSMFGADSFGVTPDLMCIAKQVTNGAIPMGAVIASTEIYQTFMNQPTPEYAVEFPHGYTYSAHPVACAAGLAALCLLQKENLVQSVAEVAPHFEKALHGIKGAKNVIDIRNFGLAGAIQIAPRDGDAIVRPFEAGMALWKAGFYVRFGGDTLQFGPTFNSKPQDLDRLFDAVGEVLNKLLD

SEQ ID NO: 11777 - protein, 168 aa, Triticum aestivum
MAPTVMASSVTSVDPFQGLMSTAGLPVSRRSDGASLGSVSNGGRIRCMQVWPIEGIKKFETLSYLPPFSTEALLKQVDYLIRSKWVPCLEFSKVGFIFREHNASPGYYDGRYWTMWKLAMFGCTDATQVINEVEEVKKEYPDAYVRIIGFDNMRQVQCVSFIAFKPPG

SEQ ID NO: 11778 - protein, 382 aa, Daucus carota
MRFTRVYTEVFNMTDHSLLCTETNNLCFDDLEARDDQDPRIDCENVVGNESEALICAVPLQRDEDFVFVFESKVNFCPEVIFSTDRSGELDLCVRKEALDWIYKAHAHYNFGALSVCLAVNYLDRFLSLYELPSGKKWTVQLLAVACLSLAAKMEEVNVPLTVDLQVADPKFVFEAKTIKRMELLVLSTLKWRMQACTPCSFIDYFLRKINNADALPSGSLIDRSIQFILKTMKGIDFLEFRPSEISAAVAICVTREAQTLDINKAMSNIIPVEKDRVFKCIEMIQDLTLVTETSNVASGRTRAQVPQSPVGVLDAACLSYKSDERTVGSCPNSSLHTETSPHTKRRKLIEIMKCGFYSITQFQIFSEWEFWCGCLCKRPPL

SEQ ID NO: 11779 - protein, 158 aa, uncultured bacterium pCosHE1
MKIISKDLRDGEKLPERHVFNGMGYQGDNISPHLAWDDVPAGTKSFVVTCYDPDAPTGSGWWHWVVANLPADTRVLPQGSGSDLVALPEGAIQTRTDFGKAGYGGAAPPKGETHRYIFTVHALDVEKIEVDEGASGAMVGFNVHFHSLESASITAMYS

SEQ ID NO: 11780 - protein, 483 aa, Burkholderia cepacia R1808
MSSGVRHDYAPLRLYIDGRFHDADGRRTQPVVDPGTTRVLGELPHATAHDIDAAVQAAHRAFVTWRHESPLVRSDLLRRAAALARERAETIGRHITMDQGKPLREAIAEVVSAAEQLEWHAEEGRRTYGRVVPARSPDVMQTVLREPIGVCAAFSPWNFPFSQAMHKIAAALASGCTLVLKGPEESPSAIVALAQLFHDAGLPPGCLNIVWGVPGDVSKQLIEAPQVRKISFTGSVPVGKQLAALAASLMKRMTMELGGHAPVLVCADADVERAAAMLAAYKFRNAGQVCVSPTRFFVQRAAFDRFVCAYLDAVGTIRVGYGLDAGVTMGPLAHARRVDEIDAFVADATAKGAQIATGGMRLPGPGHYFAPTVVLGPTRDTRLMNDEPFGPIVGIVPFDDLDDALAEANRLPFGLASYAFTTSARNAHRISRALEAGMVNINHFGMGPAEIPFGGVKDSGFGSEGGMEAFDGYLVTKFVTQMN

SEQ ID NO: 11781 - protein, 113 aa, Triticum aestivum
  unsure (1)..(113): unsure at all Xaa locations
MSDSEEHHFESKADAGASKTYPQQAGTVRKNGFIVIXKNRPCKLWRFYLQRLGKHGHAKCTCRHXHIQWGKKFEXXXPXXHNXDIPQXXRTDYQLIIFXEEVWXLLLQIGTLR

SEQ ID NO: 11782 - protein, 431 aa, Ralstonia metallidurans CH34
MTSRQQQIEALQKDWDTNPRWKGVKRNFTAEDVVRLRGSVQIEHTLARRGAEKLWHLLNTEPFVNTLGALTGNQAMQQVKAGLKAIYLSGWQVAGDANLAGEMYPDQSLYPANSVPMVVKRINNTFQRADQIQWSEGKGDIDYFAPIVADAEAGFGGVLNAFELMKSMIDAGAAGVHFEDQLASVKKCGHMGGKVLVPTREAVAKLTAARLAADVSGVPTLVIARTDAEAADLVTSDVDERDQPFLTGERTVEGFFRSKPGIEQSIARALAYAEVADLVWCETGKPDLEFAKRFAQAVHAKFPGKLLAYNCSPSFNWKKNLDDATIAKFQKELGAMGYKFQFITLAGFHSLNYSMFNLAHGYARNQMSAFVELQEAEFAAAEKGFTAVKHQREVGTGYFDAVTQTIEGGQSSTTALKGSTEDEQFFEKKVA

SEQ ID NO: 11783 - protein, 513 aa, Solanum tuberosum
MALLHLPPVTQRRLQSFFLPYTDNHVSLVPDDSGDVAMNQILKIGVVLSGGQAPGGHNVISGIFDYLQTHCKGSTMYGFRGGPAGVMKGKYVVLTPEFIYPYRNQGGFDMICSGRDKIETPEQFKQAEETAKKLDLDGLVVIGGDDSNTNACLLAENFRSKNLKTRVIGCPKTIDGDLKSKEVPTSFGFDTACKIYAEMIGNVMIDARSTGKYYHFVRLMGRAASHITLECALQTHPNVTLIGEEVFAKKLTLKNVTDYIADVVCKRAESGYNYGVILIPEGLIDFIPEVQQLIAELNEILAHDVVDEAGVWKKKLTPQCLELFELLPLAIQEQLLLERDPHGNVQVAKIETEKMLIQMVETELDQRKQKGAYNAQFKGQFHFFGYEGRCGLPSNFDSTYCYALGYGAGSLLQSGKTGLISSVGNLAAPVEELTVGGTALTALMDVERRHGKFKPVIKKAMVELEGAPFKKFASKREEWALNNRYINPGPIQFVGPVANKVNHTLLLELGVDA

SEQ ID NO: 11784 - protein, 308 aa, Glycine max
  unsure (1)..(308): unsure at all Xaa locations
MASLVSSSVLLHLFLIISALHLGAAARILSEKDQQQQLQFQYHKGPLLSGKISVNLIWYGNFKPSQRAIISDFITSLSSHKSTAQPSVATWWKGTQKYYQLIKSSPKLTLTLGTQILDENYSLGKSLTNDNIVSLASKGASKDAINVVLTSSDVTVEGFCSSRCGTHGSSVGPRKFAYVWVGNSETQCPGQCAWPFQQPIYGPXNPPLVAPNNDVGLDGMVINVATLLAGTVTNPFGNGYFQGPKEAPLEAASACTGVYGKGAYPGYAGELLVDPTTGASYNANGVSDRKYLLPALFDPTTSACSTLA

SEQ ID NO: 11785 - protein, 265 aa, Zea mays
GCCSLPSLSWLSLRAPPPRIQAARQRGTVKWFNDTKGFGFISPEDGSEDLFVHQSSIKSEGFRSLAEGEEVEFSVSEGDDGRTKAVDVTGPDGSFVRGGGGGGGGGGGYGSRGGGGSGGGGRSYGGSWGGGRRSGGGGGPGACYKCGEPGHMARDCPSADGGGGYGGGGYGGGGYGGGGGGGGCFKCGEPGHMARDCSSGGGGYGGGGGGGGGGCYNCGQAGHMARDCPSGGGGGGGRFGGGGGGGDRSCYNCGEAGHIARDCPT

SEQ ID NO: 11786 - protein, 268 aa, Rhizobium etli
RVTHHTMVHEQMSRFFTGFRRDAHPMAVMCGCVGALSAFYHDSTDITDPHQRMVASLRMIAKMPTLAAMAYKYHIGQPFVYPKNDLDYASNFLRMCFAVPCEEYVVNPVLARAMDRIFILHADHEQNASTSTVRLAGSSGANPFACIAAGIACLWGPAHGGANEAALNMLNEIGTVDHIPEYIARAKDKNDPFRLMGFGHRVYKNYDPRAKIMQKTTHEVLGELGIKDDPLLEVAMELERIALTDEYFIEKKLYPNIDFYSGITLKAL

SEQ ID NO: 11787 - protein, 464 aa, Agrobacterium tumefaciens str. C58
MKELVDGKFAGLFGGVHVLPFFNPIDGADAGFDPTDHTIVDPRLGDWEDVRALSGSVEIMADLIVNHVSSQSGAFTDFIAKGSASEFADMFMTFDKVFPDGATEEDLLRIYRPRPGLPFSKVTLADGTQRMLWTTFTPEQIDIDVHSAKGTTYLETILDRFSEANVTAIRLDAAGYAIKKAGSSCFMIDDTYAFLEEVAGKARNRGMEVLVEIHSYHRDQIEIAKKVDRVYDFALPPLILHALFTGDATPLAKWLAISPRNAITVLDTHDGIGVIDVGAHSDGRAGLLEPQAIDNLVGEIHRRSDGQSRQATGAAASNLDLYQVNCTYYDALGRNDNDYLIARAIQFFAPGIPQVYYVGLLGGVNDMDLLAKTGVGRDINRHYYGNDEIGTALETPLFHRLSNLIRFRNTHPAFGGALKATIADAGALVLSWQHGDAFAELKISFADRKASIAASGQSEMQIVE

SEQ ID NO: 11788 - protein, 507 aa, Streptomyces avermitilis MA-4680
MTRFAAPGTDGAIVSYQARYDHFIGGEYVPPARGQYFENPSPVNGQPFTEIARGTAEDVERALDAAHAVAPAWGRTSVAERSDILRRIADRMEANLEKLAVAESWENGKPVRETLAADIPLAIDHFRYFAGAIRAQEGSLGEVDDDTVAYHFHEPLGVVAQIIPWNFPILMATWKLAPALAAGNAVVLKPAEQTPASIHYWLSLVADLLPPGVLNIVNGFGVEAGKPLASSPRVAKVAFTGETTTGRLIMQYASENITPVTLELGGKSPNIFFDDVWSANDDFRDKALEGFTMFALNQGEVCTCPSRALVQRGQYAEFMEAAVARTELIKTGHPLDTDTMIGAQASNDQLEKILSYLDIGRQEGAKILTGGERIEHDGELKGGYYVQPTIFEGDNRMRIFQEEIFGPVVSVTSFNDFDDAIKIANDTLYGLGAGVWTRDINTAYRAGRAIQAGRVWTNCYHAYPAHAAFGGYKGSGIGRETHKMMLDHYQQTKNLLVSYSPKKLGFF

SEQ ID NO: 11789 - protein, 176 aa, Gossypium hirsutum
LFSFILILTHFLLKSSIRIQVLGWICVAISVSVFAAPLNIMARVVRTKSVEFMPFTLSFFLTLSAVMWFAYGLFIKDLCVALPNVLGFILGMLQMLLYAIHRHSEKVNIEEKKLPAEQMKSINVVLTTLGASEVHPVVLDIHTDDTKEEDNKNNEPTGEPDKQTDVKMEDANESPV

SEQ ID NO: 11790 - protein, 434 aa, Bradyrhizobium japonicum USDA 110
MDAKASNKTATLTVGNKNYDLPIHSGSVGPDVIDIGKLYGQSGLFTYDPGFTSTASCQSKITYIDGDAGVLEYRGYPIEQLAENGDFLETCYLLLYGNLPTAAQKKDFDDRVIHHTMVHEQMARFFQGFRRDAHPMAVMVASVGALAAFYHDSTDINDPKQRMIASMRMIAKIPTLAAMAYKYTIGQPFVYPKNSLKFAENFLHMCFAVPCEEYKINPVLADALDKIFILHADHEQNASTSTVRIAGSSGANPFACIAAGIACLWGPAHGGANEAALAMLAEIGSVDKIPEFIAKVKDKNSEVRLMGFGHRVYKNYDPRAKIMQKMCHAVLKETGHGDDPMLKVAMELEKIALSDQYFIDRKLYPNVDFYSGITLKAMGFPVSMFTVLFAVARTVGWISQWSEMIEDPQQKIGRPRQLYTGVTRRDYVAIKDRK

SEQ ID NO: 11791 - protein, 475 aa, Wigglesworthia glossinidia endosymbiont of Glossina brevipalpis
MIDNLIWFRKDLRLNDNPALYYACVDEYKSASGILILNKKKWNEKIVSKNRIRFMYKNIFSLKRNLKKIGIELIFYTCRDFFEYTCLLYNFCYTNKVKELYFNKGIEKEDLEEDKIIIKKLKKITKCICFNGNLLIDPEKIKNKNKKTYKVYSYFLKSCISFISNNNINIIPFPKIRKNKLNLIKSYNDSIKIKKKLSPCYEEHALNKLNNFIKLKINKYHITRDFCINSTSFLSPYINIGVLSLRECINNIKNNNFDFIEKKNSGHFKWFSEIIWREFCHHLIIEYSDFFDSKKLIKWTKYIKWENKIKKIQAWKNGTTGFPIIDAAMRQLKKTGWMHNRLRMITSSFLVKDLLVDWKIGEKYFYYHLIDGNSAINNFNWQWISSSGICSSPYFRMINPITQSKKFKSIYKYIKFWIPELKNIPFNEIHEPYNWIIKNKINYPNQIIEHKTAKINFFKACKKAIYIFKSKNINK

SEQ ID NO: 11792 - protein, 331 aa, Ustilago maydis 521
MADNTTLEVDLDNVIDRLLEVRGSRPGKPVHLEEYEIKYLCLKARDIFINQPILLELEAPIKICGDIHGQYYDLLRLFEYGGFPPEANYLFLGDYVDRGKQSLETICLLLAYKIKYPENFFILRGNHECASINRIYGFYDECKRRFNIKLWKTFTDCFNCLPIAAIIDEKIFTMHGGLSPDLQSMEQIRRVMRPTDVPDTGLLCDLLWSDPDKDISGWSENDRGVSFTFGPDVVSRFLQKHDMDLICRAHQVVEDGYEFFAKRQLVTLFSAPNYCGEFDNAGAMMSVDETLLCSFQILKPAEKKQKYAYGGINMGRPVTPPRKQKKKSDGK

SEQ ID NO: 11793 - protein, 503 aa, Rhodopseudomonas palustris CGA009
MINIATRINPAIAPAVSEVISQLQARHLIGNTLVPSVGGATLDVIDPATGQVIGKAPAASGDDVARAVEAASAAFPGWAATPARQRGKLIAAAASAIAERSDVIATVLALETGKAIRTECRGEVATAIDITTMYAGLASELKGETLPFDPQILTYTSREPLGVVAAILPWNVPLVLMMLKIAPALVAGNTVVVKASEEAPYATIEMARLMARLLPDGVLNVICGTGRDCGAALVEHPAVAKVTFTGSQAVGELIYQMAAKKIIPVSLELGGKSPMIVYPDADMARVVAGAIAGMRFTRQGQSCTAASRIYVHTTLIDAFVAALREAVSKLKIGDPLDEATDIGTVISPRQKAKVESYIDLGARTAGAKVDRCGELPGAAHLKDGLFLQPTIITGVPEDSPLMREEIFGPVVCVQPWDDEDDVIARANDSDFGLAATVWTNDLRSALRTVQRLDAGYVQVNQNLTIQPNLSYGGFRKSGLGKEASLEAMLEHFTKKKTVVIDMR

SEQ ID NO: 11794 - protein, 353 aa, Apium graveolens
MMQNGIGMNQNMISGVGQSGISSANSTMMPTPGMGQQGQPGPQSLGMANNAAANMPLPSQTSNAMQSAQSKYVRVWEGNLSGQRQGQPVFITRLEGYRSASASETLAANWPSTMQIVRLISQDHMNNKQYVGKADFLVFRAMNQHGFLGQLQEKKLCAVIQLPSQTLLLSVSDKACRLIGMLFPGDMVVFKPQISNQQQHQQLQPQQHHPQLQHQQQLQQLQQQPLPQLQQQQQIPQLQQQQQIPQLQQQQQIPQLQQQIPQLQQQQQQQQQQISQIQQQQQIPQMQPQQQQQAPQMQQHIPQMQQQPSQQQQMVGTGMGQAYVQGQGRSQMVSQGQVTSQGPTMSGGGGYLS

SEQ ID NO: 11795 - protein, 300 aa, Triticum aestivum
MIEQVCTKKQAGTGPEFPGYRRPTRPTSLSSSSSVPPSHPRLIGVSAAAAMAKTYPVVSAEYQEAVEKARQKLRALIAEKNCSPLMLRLAWHSAGTFDVSSKTGGPFGTMKKPAEQAHAANAGLDIAVRMLEPMKEEIPTISYADLYQLAGVVAVEVSGGPVIPFHPGREDKPQPPPEGRLPDATKGSDHLRQVFGKQMGLSDQDIVALSGGHTLGRCHKERSGFEGPWDRNPLKFDNSYFTELLSGDKEGLLQLPSDKTLLTDPVFRPLVEKYAADEKAFFEDYKEAHLRLSELGYAEA

SEQ ID NO: 11796 - protein, 366 aa, Candida albicans SC5314
MATFAPHISKITKSSTKFNYGRIAKTFLGVAGSAAIATYFYNNGNPFNNNNNNNNNNEGSKNAAKALFGASAGANVKIAKVPEGKSASDYQKVYNDIATKISENLEFDENAGYYGQLLRLAWHTSGTYDKSDNSGGSYGGTMIFAPEEFDPENAGLQVGREFLMEFLVKYPWISRGDLWTLGGVAAVQESGGPKIEWRPGRVDDNTASKVPPNGRLPDASKDGKYVKDLFARMGFNERETVALLGAHVLGRCHKHNSGYDGPWGPSFNQFTNVFYTTLLGDWHVKKWDGKKQYEDDETGEFMMLPTDMALKEESYFLKYVKMYADDQDLFFKDFAKAFSKLISNGIKYPADSKPILFKTLDEQDEE

SEQ ID NO: 11797 - protein, 213 aa, Triticum aestivum
QRPVIVNIRATGICGSDVHYWTHGRIGHFVCEKPMVLGHESSGVVVSVADDVTSLKVGDRVALEPGVPCRVCEMCKLGMYNLCPDMAFAATPPYDGTLCNYYKHAADFCYKLPDHISLEEGALIEPLSVGIHASRRGGVKLSDRVFVFGAGPVGLLTAAAAKAAGASHVTIADRDPARLAFAKEYCADETIHLTGARRLDQDSNDFAKEEAEK

SEQ ID NO: 11798 - protein, 457 aa, GIBBERELLA ZEAE PH-1
MALSYQQTKLIRGTIPALTDHGERITTIFYRNMLRDHPELNDYFNTVNQANGRQPRALTAVILSYANNINHITELIPKMERMCHKHCSLGIKPEHYAIVEKYLIAAFAEVLGPTMTTQIREAWTKAYWMLAKMLIGREAQLYRDFGKWQGYRKFRIEKKVEESDDIYSFYLVPVDGKRLPSFQPGQYVSVQIPIVDKGYVQSRQYSLSDAPRPDYYRVTVKRDEGIHMTRSGRYLGGDALNPGVVSNLLIDMKDEGDVVELAHPAGEFYLDMSNTSNVPIVLISAGVGVTPMMSILNTVSERQPHRPVSWIHGSRRSVPFYDQVRRIARNRSNFRTNIFKTHLAESDIFGVTYDHDFRMDLAKVSKDDLYLCHSSTEYYICGPEQFMLEMAEYLKAQKVDASRMHFELFSTGDMEFKVDNLSISSASKSPSIASAEQRCPSTGAVSADGATCPFSAV

SEQ ID NO: 11799 - protein, 380 aa, GIBBERELLA ZEAE PH-1
MDSAARQQPQVQPCRYKVGKTLGAGSYSVVKECVHIDTGRYYAAKVINKRLMAGREHMVRNEIAVLKKVSMGHQNILTLVDYFETMNNLYLVTDLALGGELFDRICRKGSYFESDAADLVRATLSAVAYLHDHGIVHRDLKPENLLFRTPEDNADLLIADFGLSRIMDEEQFHVLTTTCGTPGYMAPEIFKKTGHGKPVDLWALGVITYFLLCGYTPFDRDSDFEEMQAILNADYSFTPIEYWRGVSAHAKDFIQRCLTIDSTKRITAHEALQHPFVAGFINAEGESQNLLPNIKKNFNARRTLHAAIDTVRAINKLREAQSGLMDGARSKEPSRGAAQQTPTNRKHPTSHPRCNPATTEIELSKLPKVSGAQRRAVRIR

SEQ ID NO: 11800 - protein, 167 aa, Ostreococcus tauri
MTVTLRSSDDETFVVDDDVALSETIKSIIEGARDGRDGVNGAKDGVRDADTEDESMVPLPNVSSKILAKVIEYAKFHVDAKKANEAEAKIKEFNTEFVKVDQATLFEIILAANYLNMKGLLDLTCMTVANMMKGKTPEEIRKTFNIKNDFTPEEEEEVRKENQWAFD

SEQ ID NO: 11801 - protein, 456 aa, Arabidopsis thaliana
MDQEEEEIEIPNYFICPISLEIMKDPVTTVSGITYDRQNIVKWLEKVPSCPVTKQPLPLDSDLTPNHMLRRLIQHWCVENETRGVVRISTPRVPPGKLNVVEEIKNLKKFGQEALGREETLQKLEVLAMDGNNRRLMCECGVHKSLILFVVKCTSEDEDGRRRIKGLDESLRLLHLIGIPSNDAKTILMENDRVMESLTWVLHQEDFLSKAYTIVLLRNLTEYTSSHIVERLNPEIFKGIIGFLKDVVNSVNRTSPTVRETVQSSSRPSLGKTEPSKLDHSLVIKQAVTAALMILLETSSWSRNRSLLVDLGAVSELIELEISYTGEKRITELMLGVLSRLCCCANGRAEILAHRGGIAVVTKRLLRVSPAADDRAISILTTVSKFSPENMVVEEMVNVGTVEKLCSVLGMDCGLNLKEKAKEILKDHFDEWKKFPCIDITLLTKLLSISPKGPKI

SEQ ID NO: 11802 - protein, 203 aa, Glycine max
  unsure (1)..(203): unsure at all Xaa locations
MADGPASPGGGSHESGDHSPRSNVREQDRYLPIANISRIMKKALPANGKIAKDAKETVQECVSEFISFITSELVCFFFSSDSFLLRFSYLSSPAFNLXFLEFCRASDKCQREKRKTINGDDLLWAMATLGFEDYMDPLKIYLTRYREMEGDTKGSAKGGDSSAKRDVQPSPNAQLAHQGSFSQNVTYPNSQGRHMMVPMQGPE

SEQ ID NO: 11803 - protein, 321 aa, Pseudomonas aeruginosa
MALNPDIAAYLELVGNGRSSGKSLPMHQLTVQQAREQFDQSSALMDPGLDEPLARVETLFVPARDGTPLPARLYSPQGLSASPPLPGVLYLHGGGYVVGSLDSHDALCASLAERAGCVVLSLAYRLAPEWRFPTAAEDAEDAWCWLAAEAARLGIDPQRLAVAGDSVGGSLCAVLSHRLALRGEASQPRLQVLIYPVTDASRTHQSIERYAVGHLLEKDSLEWFYQHYQRSPEDRQDPRFSPLLGVVPADLAPTLLLVAECDPLHDEGIAYAEHLRQGGARVELCVYPGMTHDFLRMGAIVDEADDAKDMIADALVAALAT

SEQ ID NO: 11804 - protein, 498 aa, Leptospira interrogans serovar Copenhageni str. Fiocruz L1-130
MQTALYISVLIISSCGLVYELLAGTIASYLLGETVTQFSLIIGTYLFSMGVGSWLSKYLEKDLIPKFLEIELAIGLVGGFSSAILYLSFGQIRYFQIPLFLLVILIGILVGLEIPVLLRILKKELQFKELVSRVLSLDYVGALLASILFPIFFAPKLGLMRTGFIFGILNVGVALWGTWVLPLRQSKIIILRAQSVVVLTLLILGFSYSDLITYYSEESLYTDEIILSKQTQYQRIIVTRWKNEIRLFLNGHLQFSSRDEYRYHETLVHPALLAHPTPKKVLVLGGGDGLAVREILKHKNVESVTLVDLDSAITNLFSEHGILKKLNEESLKNSKVTVINTDAFLWLEESDQIFDVVLIDFPDPSNFSLGKLYTTAFFHTLKRRMNETSVLEIQSTSPLFARSSYWCIERTIASLGFYTLPLHVYVPSFGEWGFVLAGQRPIQFKKDFPKDLKFLNIQELESIQTFPQDMSRVPVEINRLDNQALVRYYDREWNRILD

SEQ ID NO: 11805 - protein, 176 aa, Zea mays
VSTIARYGPATTFTEPVRKWYKEWVPVVAADVNTNASANGGAAPSTGTGSGGGSRGSDLLLFKWTPVNGANGGGGEGEQHQAAETATRRRRYVPVSLMEEQRQESTKSDDENKANDGDPSSNETEPSNEFSDINGTPMDESQASDEDGRNSGKNGGETDLNLNLGFERPGPVIIEI

SEQ ID NO: 11806 - protein, 222 aa, Bacillus cereus ATCC 14579
MRFFIDTANLEDIKKAYKLGVLAGVTTNPSLVAKEGVKFEDRIAEICQAVPKVESVSAEVTPDAVTAEEMIAQAEELIKINGGDKNVTIKLPMTLAGLEACRYLTEKGVKTNVTLIFTVNQALLAARAGATYVSPFLGRLDDISEDGVLLVAKIAELFDVHQLDTQIIAASVRHPDHVTRVAMAGAHIATIPYKVIEQLAMHPLTDQGIEKFAADWAKAPKL

SEQ ID NO: 11807 - protein, 501 aa, Arabidopsis thaliana
MANLRLMITLITVLMITKSSNGIKIDLPKSLNLTLSTDPSIISAASHDFGNITTVTPGGVICPSSTADISRLLQYAANGKSTFQVAARGQGHSLNGQASVSGGVIVNMTCITDVVVSKDKKYADVAAGTLWVDVLKKTAEKGVSPVSWTDYLHITVGGTLSNGGIGGQVFRNGPLVSNVLELDVITGKGEMLTCSRQLNPELFYGVLGGLGQFGIITRARIVLDHAPKRAKWFRMLYSDFTTFTKDQERLISMANDIGVDYLEGQIFLSNGVVDTSFFPPSDQSKVADLVKQHGIIYVLEVAKYYDDPNLPIISKVIDTLTKTLSYLPGFISMHDVAYFDFLNRVHVEENKLRSLGLWELPHPWLNLYVPKSRILDFHNGVVKDILLKQKSASGLALLYPTNRNKWDNRMSAMIPEIDEDVIYIIGLLQSATPKDLPEVESVNEKIIRFCKDSGIKIKQYLMHYTSKEDWIEHFGSKWDDFSKRKDLFDPKKLLSPGQDIF

SEQ ID NO: 11808 - protein, 395 aa, Methanosarcina acetivorans C2A
MNEQGLSEKEIFSYLENAKSEDTDYYRVLSSMCTHPHKIAVEANRLFIEANLGDLGLFAGASRLEQEVVGMLGELLHAPSIDVPFGGSCESSACGYLTTGGTESNIQAVRGMKNLVTTGKKELKGAPNIVIPESAHFSFDKVADMMGIEVRRASLDSEFRVDMASIESLIDANTIGLIGIAGNTEFGQIDPIDKLSEIALENELFLHIDAAFGGFVIPFLEKPQPFDFKLPGVTSIAVDPHKMGLSTIPSGALLFRSASFLDSLKVNTPYLTTKAQFTLTGTRSGASAAATCAVMKYLGNEGYRKNVQYCMQLTEKLVIEARKIGFEPLLEPVMNVVALKVPNPDFVREQMLERFGWNVSITRTPRALRLVLMPHNTLEDIEIFVQDLKEVTVEI

SEQ ID NO: 11809 - protein, 389 aa, Brassica napus
MNRGALESSPVQQLMVAGNPNWWNVSGSTRPPPPLMGHQQGPLPPQMTPNNNYLRPRMMMTSSSPSLLDNPSLSSWLESNDLPPESWSLSQLLLGGLMMGEEERLEIMNHHSHHDEQHHHSFQGKMRLENWEEQVLRHQQASMGVVDIKQESNINNNNGYLISSPNSPPNKSCVTTTTTTSLNSNDNTNNNNNMLGFSSNHNGLNLSEIRHTPPDRSSECNSLDIGGSTNKKPRLQPSPSSQSTLKVRKEKLGGRIAVLHQLVSPFGKTDTASVLSEAIGYIRFLQNQIEALSHPYFGTTASGNMRNQHLQGDRSCLFPEDPGQLVTDQCVKRRGVSSSSSENQNAKEEPKKDLRSRGLCLVPISYTLQVGSDNGADYWAPTLGSASFH

SEQ ID NO: 11810 - protein, 161 aa, Zea mays
SAISSFNERPIILALSNPTSQSECTAEQAYTWSKGQAVFATGSPFDPVEYNGKIHVPGQANNAYIFPGFGLGVVMSGAIRVHDDMLLAASEALAQQVTEENFEKGLIYPPFSNIRKISAHIAASVAAKAYELGLASRRPRPKDLVKYAESCMYSPIYRNYR

SEQ ID NO: 11811 - protein, 217 aa, Glycine max
MASLALETEDVISDIYLSLGLKESDKGVGVPRVLSLLSSLLERSVQRNETALEAKHVKDVVTVFHGLRAPTLSVRKYIDRIFKYSGCSPSCFVVAHIYVDRFIQHTEIKLTSLNVHRLLITSIMLAAKFIDDAFYNNAYYAKVGGVSTSELNRLEMSFLFGIDFRLQFSVDTFGRYCRQLEKEAAEVVQIERPMQACRIKESWSNKDDPTCASTIAR

SEQ ID NO: 11812 - protein, 231 aa, Lycopodium annotinum
MGRGKIEIKRIENATSRQVTFSKRRGGLLKKAHELSVLCDAQVALIIFSSTGKLFEYASPSMKEILDRYGKYPEGVQTGTVTDPNNDVMLQYLNREVIRMKQQIERTHQTQRHMMGEDLAILPLKDLQQLEEQLDIGLRRIRARKDQLLVEQLEELHRKERHWLEENEALRRKLAGGQALSGPVPSPLSIVNPLETREPPSLGTVSLPFSVQFNQQNMQDTPNLQTSLQLG

SEQ ID NO: 11813 - protein, 479 aa, Pseudomonas putida
MSLLIRGATVVTHEESYPADVLCADGLIRAIGQNLEPPTDCEILDGSGQYLMPGGIDPHTHMQLPFMGTVASEDFFSGTAAGLAGGTTSIIDFVIPNPQQSLLEAFHTWRGWAQKSASDYGFHVAITWWSEQVAEEMGELVAKHGVNSFKHFMAYKNAIMAADNTLVASFERCLQLGAVPTVHAENGELVYHLQKKLLAQGITGPEAHPLSRPSQVEGEAASRAIRIAETLGTPLYLVHISSREALDEIAYARGKGQPVYGEVLPGHLLLDDSVYRDPDWATAAGYVMSPPFRPREHQEALWRGLQSGNLHTTATDHCCFCAEQKAMGRDDFSRIPNGTAGIEDRMAVLWDAGVNSGRLSMHEFVALTSTNTAKIFNLFPRKGAIRVGADADLVLWDPQGTRTISAQTHHQQVDFNIFEGRTVRGIPSHTISQGKVLWADGDLRAEPGAGRYVERPAYPSVYEVLGRRAEHQRPMPVQR

SEQ ID NO: 11814 - protein, 237 aa, Lycopodium annotinum
MGRGKIEIKRIENATCRQVTFSKRRSGLLKKAHELSVLCDAQVAVIIFSSTGKLFQFASTRMKEILERYERNSDPLQIDAVIPRDLEYWSREAAKAKDELDRCHQKNRHMLGEDLSALNLNELEELEQQLDSGLRRVRCRKDQVLRDRIEELTKQESFLREENRMLRSKIAVPKESTEPILDEMNMETREPPSMAIVEEELSLKLNSKTWPDIHFSLQLGQYQPPRTETPTANHRPN

SEQ ID NO: 11815 - protein, 240 aa, Triticum aestivum
MGDRPKLPARYEQVKLLGEGNFAKVYLARHMDTKEEVAIKVMDKEKLIKLGAVQQIKREIAVMRRLRHPNIVQLHKVMACKSRIFVVMEYVRGGPLYRHIPANGGLKEDETRRIFQQLVSALTFCHAQGVYHRDIKPDNLLVDEHGNLKVADFGLSAHADTARREALLHTVCGTPLYVPPEVFARRGYDGAKADAWSCGIVLFVLAAGRKPFRDDDFITLYRTICRGDYRCPRTFSPELV

SEQ ID NO: 11816 - protein, 117 aa, Triticum aestivum
  unsure (1)..(117): unsure at all Xaa locations
MAPAVMASSATTVAPFQGLKSTAGLPVSRRSSGSLGSVSNGGRIRCMQVWPIEGIKKFEXTLSYLPPLSTEXLLKQVDYLIRSKVGACLQFSKGLLRPLSKKPPGLLVEYWDKCWLP

SEQ ID NO: 11817 - protein, 324 aa, Triticum aestivum
MEAETAAKRARENEGAAAADGAGEQAGISAVIPGWFSEISPMWPGEAHSLKVEKVLFQGKSDYQDVLVFQSSTYGKVLVLDGVIQVTERDECAYQEMITHLPLCSIKDPKKVLVIGGGDGGVLREVSRHSSVEQIDICEIDKMVVDVSKQFFPHLALGFEDPRVSLHIGDGVAFLKNAPEGTYDAVIVDSSDPVGPAQELFEKPFFQSVSRALRPGGVVCTQAESIWLHMHIIEDIVTNCRQVFKGSVNYAWTTVPTYPSGVIGFMLCSTEGPSVDFQHPVFSIEEDEYSTKSKGPLKFYNSEFHTASFCLPSFARRVIEAKAN

SEQ ID NO: 11818 - protein, 127 aa, Brassica napus
  unsure (1)..(127): unsure at all Xaa locations
MTRVTRDFRDSLHKEVVPAAAVSADVRFASSRFPNYRIGANDQIFDVKDDPKVLSMKEVVARETAQLMDQQKRMSVRDLANKFEKGLAAAAKLSEEAKLKEATSLEKHVLLKKLRDALESLRGRXAG

SEQ ID NO: 11819 - protein, 224 aa, Candida albicans SC5314
MSSDKSNLLKKYKIVFLGDQSVGKTSLITRFMYDTFDETYAATIGIDFLSKTMYLEEGKTIRLQLWDTAGQERFRSLIPSYIRDSHVAVICYDITNKKSFDNLDKWIKDVKLERGDDVIIVLVGNKSDLASDKRQVSLDDVENLQIKIGAKFFIETSTKANHNVKLLFKKIAQSLPDFNQDSNDKSNDNNNNNNNNNNNNNQSETIDITIDNTAPNPQGTSTCC

SEQ ID NO: 11820 - protein, 375 aa, Pseudomonas putida KT2440
MAEAKVLSGAGLRGQVAGQTALSTVGQAGAGLTYRGYDVRDLAAGAEFEEVAYLLLYGELPTQAELADYKRKLKGLRDLPQALKEVLERIPRDAHPMDVMRTGCSVLGTLEPELTFEAQRDKTDRLLALFPAVMCYWYRFTHHGVRIDCTTDEDTLGGHFLHLLHGKKPSELHVKVMNVSLILYAEHEFNASTFTARVCASTLSDLYSCVTAAIGSLRGPLHGGANEAAMELIERFQSPQEATAELLRMLERKDKIMGFGHAIYKESDPRNEVIKGWSKQLADEVGDKVLYPVSEAIDKTMWEQKRLFPNADFYHASAYHFMGIPTKLFTPIFVCSRLTGWAAHVFEQRANNRIIRPSAEYVGVEQRQFVPIEQR

SEQ ID NO: 11821 - protein, 199 aa, Triticum aestivum
MAMEKNQDSKVIMGRYKLGRLLGRGSFAKVYKAHNISTGEFVAIKVFDKEAVHRSGTVEQVKREVDVMRRVHHPNVVRLHEVMATRSRIYFVMEYASGGELFDRLAKSTRFPEPVARRYFQQLVTAVEFCHSRGVYHRDLKPENLLLDAHGNLKVSDFGLSALADGASRHRGDALLHTTCGTPAYVAPEVILKRGYDGA

SEQ ID NO: 11822 - protein, 66 aa, Zea mays
MQNPNAATCEHKEEMDSRLVFGGNVYYTCTPDEVQQYFNFFGTVNKLTILTDNFGQPKVAAYAEFA

SEQ ID NO: 11823 - protein, 279 aa, Synechocystis sp. PCC 6803
MALIQWYPGHIAKAERQLREQLNKVDVVLEVIDARIPLASQHPDVPLWVGEKPKLIILNRVDMITPELQEQWLTWFRQQNQTVYYANAKQGTGVKAISKAAQQAGKAVNERRQRRGMQPRPVRAVVMGFPNVGKSALINRLLGRKVVESARRAGVTRQLRWIRISDSLELLDSPGVIPLKLENQANALKLAICEDIGEAAYENQAVAIAMVDLLLDLSLGEALTQRYQVPPEAMNGDLYLIALADARHNGDRERAAVQLLNDFRKGLLGPLPLELPPEV

SEQ ID NO: 11824 - protein, 480 aa, Neisseria meningitidis Z2491
MKQLAMYINGRFENDFNGEWRNVLNPSTEEAIAREPKGGKADVDRAVAAARAAQPAWERLPAVERGAYLRKIAQGIRERADELTDTIVAEGGKTKDLARVEVMFTADYLDYQAEWARRYEGEIIQSDRPRENILLFKRPLGVIAGILPWNFPFFLIARKMGPALVTGNTIVVKPSSVTPINCHIFAEIVDAVGLPAGVFNVVNGPGAEIGNALSAHPQVDMVSLTGSVEAGRQVMEAASANITKVSLELGGKAPAIVLKDADLDLAVKSILASRVGNTGQICNCAERVYVHSSLKDAFIEKMTAAMKGVRYGNPAEAEAGALEMGPLIEERAVKAVAEKVERAVKQGAKLVCGGKRAEGRGYFFEPTLLTDTDNSMDIMKEETFGPVLPVSAFDTLDQVIALANDCEFGLTSSVYTTNLNEAFYVTRRLQFGETYINRENFEAMQGFHAGWKKSGIGGADGKHGLEEYLQTQVVYLETDI

SEQ ID NO: 11825 - protein, 238 aa, Oryza sativa (japonica cultivar-group)
MFIRMRAASTTSSSEPCRRLSPPSSKRPAGRTKFHETRHPVFRGVRRRGRAGRWVCEVRVPGRRGCRLWLGTFDAADAAARAHDAAMLALRGRAAACLNFADSAWLLAVPPPATLRCAADVQRAVARALEDFEQRESSSSVFPLAIDVVAEDAMSATSEPSAASDDDAVTSSSSTTDADEEASPFELDVVSDMGWSLYYASLAEGLLMEPPASGASSDDDDDAIVDSSDIADVSLWSY

SEQ ID NO: 11826 - protein, 214 aa, Listeria innocua Clip11262
MRFFIDTANVEEIKKANRMGFIAGVTTNPSLVAKEGRDFNEVIQEITSIVDGPISGEVVSLNAEEMIEEGRVIAKIHPNMVVKIPMTGEGLAAVKVLTEEGIKTNVTLVFSATQALLAARAGATYVSPFLGRLDDIGDDGLVLIRDIAEIFETHGIPTEIISASVRHPIHVIECAKAGADIATVPYKVFEQMLKHPLTDSGIDKFLADWEAAKK

SEQ ID NO: 11827 - protein, 158 aa, uncultured bacterium pCosHE2
MKLISNDLRDGDKLPHRHVFNGMGYDGDNISPHLAWDDVPAGTKSFVVTCYDPDAPTGSGWWHWVVVNLPADTRVLPQGFGSGLVAMPDGVLQTRTDFGKAGYDGAAPPKGETHRYIFTVHALDIERIDVDEGASGAMVGFNVHFHSLASASITAMFS

SEQ ID NO: 11828 - protein, 92 aa, Triticum aestivum
MVLPSEQKARYSTEEDPSRCSCSDSFFGKYFSFLLLMFVTASLVILPLVLPPLPPPPSMLMLVPVAMLVMLLVLAFMPTSGGRGATGPTAYL

SEQ ID NO: 11829 - protein, 96 aa, Zea mays
MNSFSAQVQKPTPTTTGPQLVTVASVDASSSIEQRGGREMKEGTANCIDILIAIILPPLGVFLKFGCKVEFWLCLLLTFLAYLPGIIYAIYVITKD

SEQ ID NO: 11830 - protein, 75 aa, Glycine max
MPTRCEICCEIMIAILIPPLGVCFRHGCCSVEFIICLLLTILGYIPGIIYALYAIIFVDRDQYFDEYRRPLYAQY

SEQ ID NO: 11831 - protein, 164 aa, Cicer arietinum
LVAGEAGTGIAELIALEMSKQTKTPIEETRKKIWLVDSKGLIVSSRANSLQHFKKPWAHEHEPVGTLIDAVKVIKPTVLIGSSGVGKTFTKEVIEAMTSNNEKPLILALSNPTSQSECTAEEAYTWSEGRAIFASGSPFDPVEYNGKVYYSGQSNNAYIFPGFG

SEQ ID NO: 11832 - protein, 427 aa, Escherichia coli
MADTKAKLTLNGDTAVELDVLKGTLGQDVIDIRTLGSKGVFTFDPGFTSTASCESKITFIDGDEGILLHRGFPIDQLATDSNYLEVCYILLNGEKPTQEQYDEFKTTVTRHTMIHEQITRLFHAFRRDSHPMAVMCGITGALAAFYHDSLDVNNPRHREIAAFRLLSKMPTMAAMCYKYSIGQPFVYPRNDLSYAGNFLNMMFSTPCEPYEVNPILERAMDRILILHADHEQNASTSTVRTAGSSGANPFACIAAGIASLWGPAHGGANEAALKMLEEISSVKHIPEFFRRAKDKNDSFRLMGFGHRVYKNYDPRATVMRETCHEVLKELGTKDDLLEVAMELENIALNDPYFIEKKLYPNVDFYSGIILKAMGIPSSMFTVIAAMARTVGWIAHWSEMHSDGMKIARPRQLYTGYEKRDFKSDIKR

SEQ ID NO: 11833 - protein, 482 aa, Candida albicans SC5314
MGSNSSKSAPTLQRSDTNNSTRSTRSNRSIRSRRSISSIKDSQQQQSDSQQQQEEEEEQSQSQQRPQPILSRNNSATSENPILIRRNTNETLQTPNFSDTLSPHSHSQQQQQQPGSPLSTSMNGNTISRTSTNHSIISTTSHKSSSQQSNLPLKKETTTSSLSTNSNTIDIDSLIDKLLNAGFSGKRTKNVCLKNTEIELICASAREIFLSQPSLLELAPPVKVVGDVHGQYHDLIRIFSKCGFPPKTNYLFLGDYVDRGKQSLETILLLLCYKIKYPENFFLLRGNHECANVTRVYGFYDECKRRCNIKTWKLFIDTFNTLPIAAIVAGKIFCVHGGLSPVLNSMDEIRNIARPTDVPDFGLLNDLLWSDPADTINEWEDNERGVSYVFSKVAINKFLSKFNFDLVCRAHMVVEDGYEFFNDRTLVTVFSAPNYCGEFDNWGAVMGVSEDLLCSFELLDPLDSAALKQVMKKEKQERKKST

SEQ ID NO: 11834 - protein, 126 aa, Zea mays
MPVAASLMAIELEKDQLAWAEQQRQQNRRQTMVVCRKSAAAVAKGQQRQNASPPSPKPPPAGGLSAEAFLVLACVAVSLIVLPLVLPPLPPPPPLLLLVPVCLLLLLAALATFVPSDVRSMPSSNL

SEQ ID NO: 11835 - protein, 279 aa, Bacillus cereus ATCC 14579
MKNLQSKTVLSNGVEMPWFGLGVFKVEEGPELVEAIKSAIKAGYRSIDTAAIYGNEAAVGEGIRAGIETTGISREELFITSKVWNADQGYEETIAAYEESLKKLKLDYLDLYLVHWPVEGKYKDTWRALETLYKEKRVRAIGVSNFQIHHLQDVIKDAEIKPMINQVEYHPRLTQKELQAFCKEQGIQMEAWSPLMQGQLLDNETLQEIAEKHGKTTAQVILRWDLQNGVITIPKSTKEHRIIANADVFNFELTKEDMEKIDALNQNHRVGPDPDNFDF

SEQ ID NO: 11836 - protein, 170 aa, Triticum aestivum
  unsure (1)..(170): unsure at all Xaa locations
MSHRMMMNPVKVEGDGRAGGGGAPRPMDGLGDAGPTPFLAKTYDMVDDPATDAVVSWSATNNSFVVWDPHLFATVLLPRYFKHGNFSSFVRQLNTYGFRKVDPDRWEFANEGFLRGQRHLLRNIKRRKPNMGSKNNNLXVLLEXGNFGHDVEIDXLKRDRXLLXXEXVKL

SEQ ID NO: 11837 - protein, 157 aa, Carica papaya
MDVRMFVLESPILSSLRQLMELQDTETEKSFNAPTRTYVRDAKAMAATPADAKEYPNSYVFVIDMPGLKSGDIKVQVEDDNVLQISGERKREEEKDGVKYLRMERRIGKFMRKFSLPDNANTDAISAVCQDGVLTVTVQKLPPPEPKKPKTIEVKIA

SEQ ID NO: 11838 - protein, 386 aa, Aspergillus parasiticus
MTGLDMETIFAKIKEEYARTDDVGKRQIQGHIRELQVGFYSDWDVVMRLSSGPLQVALTKVGIDLGIFRSLKESDTPITLAEIVKKTGASPRLLGRILRTQAAFGLIKETGPQEYTSSAFTDVFANSDAAGAVVQLFDISGPCTQILPDFLAERNYQDITSNKDCVFQKAFGSDLTMFEWMPQHPKHMESLGHLMALERPVSWVDHYPVLEELGGFPAPDKVLMVDIGGGFGQQSKALRAKFPDLPGRLIVQDIPQTLANAQPAAGIEFMEHNFFEPQPIQNAKFYYLRHVFHDWPDEQCVLILKQIIPAMGPESQILIDEMVIPSTGVPWQAAFTDLLMMNSLGGVERTRAEWDDLMEQVGLEIIQSKVYDSKEQAILVAVPKRT

SEQ ID NO: 11839 - protein, 251 aa, Corynebacterium efficiens YS-314
MEYGTPPPPSTSPTPDATCAHGLSNFPHCDEHHPRLPRQYAPQSGAELVLPRTSSPLTPHPHRTTCSHPVNPILTGYTEVLHRGKCQTHTSNPTGTGPRDLTRGELFSRGDYRWEGFHGTLDDGRGFYAQCLGARRRCTRERPVFFTRAVTAGVDGHRGVLTTRTSVNHAGERSITSSEIKVIHMAQGTVKWFNAEKGFGFIAPSDGSADVFVHYSEIQGNGFRNLEENQQVEFELGEGAKGPQAQQVRAL

SEQ ID NO: 11840 - protein, 319 aa, Escherichia coli O157:H7 EDL933
MKPENKLPVLDLISAEMKTVVNTLQPDLPPWPATGTIAEQRQYYTLERRFWNAGAPEMATKAYMVPTKYGQVETRLFCPQPDSPATLFYLHGGGFILGNLDTHDRIMRLLASYSQCTVIGIDYTLSPEARFPQVIEEIVAACCYFHQQAEDYQINMSRIGFAGDSAGAMLALASALWLRDKQIDCGKVAGVLLWYGLYGLRDSVTRRLLGGVWDGLTQQDLQMYEEAYLSNDADRESPYYCLFNNDLTREVPPCFIAGAEFDPLLDDSRLLYQTLAAHQQPCEFKLYPGTLHAFLHYSRMMKTADEALRDGAQFFTAQL

SEQ ID NO: 11841 - protein, 170 aa, Zea mays
LRMEVDRQPVQPAIHAPGVTGRRREDQMVPSMTSSFIRAETELTADFGHTSEDSRPEVPSNIHHLQARPEREETVDGGTGNAVRVHGNHHQQNLQNNMHRVLGIAPSISEASSSWTGRDGGVVPVWSPPAASGHSDPYAADEADISSRGYLDRHPQSHTMMNWSQLSQSL

SEQ ID NO: 11842 - protein, 478 aa, Streptomyces avermitilis MA-4680
MASAFEYAPAPESRSVVDIAPSYGLFIDGEFTEAADGKVFKTVSPSTEEVLSEIAQAGEADVDRAVKAARKAFEKWSALPGSERAKYLFRIARIIQERSRELAVLETLDNGKPIKETRDADLPLVAAHFFYYAGWADKLDHAGFGANPRPLGVAGQVIPWNFPLLMLAWKIAPALATGNTVVLKPAETTPLSALFFADICRQAGLPKGVVNIIPGYGDAGAALVEHPDVNKVAFTGSTAVGKAIARQVAGTEKKVTLELGGKGANIVFDDAPIDQAVEGIVTGIFFNQGQVCCAGSRLLVQESVQDELLDSLKRRLSTLRLGDPLDKNTDIGAINSAEQLSRITSLVDQGEAEGAERWSPACELPSSGYWFAPTLFTNVTQAHTIARDEIFGPVLSVLSFRTPDEAVAKANNSQYGLSAGIWTEKGSRILAVASKLRAGVIWANTFNKFDPTSPFGGYKESGFGREGGRHGLEAYLDV

SEQ ID NO: 11843 - protein, 147 aa, Zea mays
MVGRRRVALDLCGVRHTSISKLATGLSGFIAQKRRTVCVLKLSEVRLGNSDGYQHGQCWRDVYDAICQARRLIYIIGWSMFHTIHLVRDGHDDMALGDLLRRKSQEGVQVLLLVWDDPTSRRLLGIKMEGYMGTRDEETRRFFKHSS

SEQ ID NO: 11844 - protein, 142 aa, Campylobacter coli
MTQEQIQIIKDCVPILQKNGEDLTKEFYKIMFNDYPEVKPMFNMEKQASGEQPKALAMAILMAAKNIENLENMRSFVDKVAITHTKLNVKEEHYPIVGACLLKAIKVVLYADETTLKAWEEANKAIAQFYIDIEKEIYAKAK

SEQ ID NO: 11845 - protein, 453 aa, Ustilago maydis 521
MTLELPTETTHLSDSLLAEFARHTTIDIDNNVASIAAQHNLAHRRLLELDETKHTNRAQIDQQVVNEFQSLFHDMTSNQIIVLSTYSELLTNDKNKAAKLVEMCVAAAKQIKGGMWNGKQLSSTVLERISVDGLTGAESDEEKHQQLASDILTVHFGLEMLPNLLASGNLHAQTATSQAYNASATVRHARRFVALYELISGDTVDSSRVCIKIPTTIAGLQAMRFLSSGGILDENNVGGPLLEGKIQVLATTVFAVEQGLAAAQAAGATYVAPYINALAAHFFDAENPSAEDKQKALDAGGRSISEIIYPLQRCLRRMRQQNNKIKTKVMAASFINAEEAIELCGLDHVTLGAGIVQALATTKLTDGIVETMHQASDKMRIAEEKELERYCATLAAIKDGEAQGCGGWLKQGHRSHARLEIVLTQDERCRYMLADALARFTSAEVKLRQLFVV

SEQ ID NO: 11846 - protein, 497 aa, Brucella suis 1330
MTQENKMGKHENKAGGASLLHYGNFIAGQWQDAVGGEHITLKNPSDGSDLAPIARGAKADIDLAVVAARSALSGDWGKLTATERGRILHRISEEVLKNIDLLTDLESKDVGKPVTQARADVVALARYLEFYGASADKVHGDTLPYQNGFTVLSIYEPHGVTGHIIPWNYPMQILGRSLGAALAMGNAAVVKPAEEACLTILEFARIAEKAGLPKGALNVVTGFGAEAGAALCEHPDVNHISFTGSVRTGEVVQAAAAKNTVPVTLELGGKSPQIVFADADLDRALPFLVNAGIQNAGQTCSASSRILVERSIYEEVIARMSERYRALKVGPASADLSVGPVVSQRQKAIVDGYLDLAKESGLAIAAQGVLAEGAPEGGAYVLPTLIRDVPADHRLAQEEIFGPVQVILPFDTEEEAIAIANGTHYGLVCGIWTNDGGRQFRLAHAIHSGQVFINNYGAGGGIELPFGGVKKSGHGREKGFEALYGFASLKTISVYHG

SEQ ID NO: 11847 - protein, 138 aa, Glycine max
  unsure (1)..(138): unsure at all Xaa locations
ALSMISSPADTTINRAGAGLDAPFTGLKYMAGFPTRKTNNDLTSIASNGGRVQCMHVWPPVGKKKYETLSYLPDLDDAHIGKRQSNTLLRNGWIPCLEYALDHGFMYREHNMSPGYYDGRYXTMRKLPMLDCTVASKE

SEQ ID NO: 11848 - protein, 494 aa, Corynebacterium diphtheriae NCTC 13129
MTHTTQTLDDRIHELLQRIPTELFIAGQFQPAHNGATLSVTNPSDGSELATVASASEKEARAALDAAEKAQPTWAATPARERSEILRRAYDLVIEHKDDLAMIQSLELGRALPDSEAEVTYAAEFFRWFAEEAVRIRGDYRHNPTGNARIITHQQPVGPCLAITPWNFPLAMGARKLAPALAAGCTMILKPASKTPLTMLYLAQLLAEAGVPHGVVSVLPTANASVVSDLLHDARIRKLTFTGSTAVGQKLAAMAAEHSAAVSLELGGNAPYIVLDDADIDTAAQAVAVAKMRGAGQVCIAANRFLVHSSIAEEFTQRVVNIMRGFTQGPATAPGVDFGALSGDDQVSTVTTLVDDALSRGATKLLGDLPKGLPEHGSYYPATVLVDVPEDADIHCEEIFGPVVVISTFDDDDEAVARANDTKFGLAAYVFGSDLQRVLNVAERVDAGMIAVNKGALSDPAAPFGGVKESGLGREGGFEGIGEFLETKLISLPL

SEQ ID NO: 11849 - protein, 352 aa, Bacillus sp. KSM-K16
MKALVLEANQSFTIKDIETPVPKEDEALIKVAYCGICGSDLARYFDGKVHNYPIVLGHEFSGTVEAVGASVDSVAVGDRVVVAPLLPNKDDPFMQKGSPALSSSYSFLGSRENGAMAEYVVVKAENLLVLPETVTLAEAALIEPLTVAIHGIERIVLPAGEHVCVLGAGTIGIMTILALKARGAGKVTAIDINDEKLAFAKKIGADDTINSLKEDPVSYASKHGKPGAVIETAGVPSSQEQAVALVEKKGKIVFVGTASGDVTFPAATFEKILREELEITGSWMSYSGPFPGYEWQAAIDYIASGKIDVKPLIHDVFKLEDGDKPFQAMKDPDNHSIKLLYQIAENEGQVGK

SEQ ID NO: 11850 - protein, 143 aa, Zea mays
MAMAYKMATEGMNVKEECQRWFMEMKWKKVHRFVVYKIDERSRAVLVDKVGGPGEGYNELVAALPGDDCRYAVFDFDFVTVDNCQKSKIFFIAWSPAASRIRAKILYATSKQGLRRLLDGVHYEVQATDPSEMGFDVIRGRAQ

SEQ ID NO: 11851 - protein, 201 aa, Neisseria meningitidis Z2491
MMTLYSGITCPFSHRCRFVLYEKGMDFEIKDVDIYNKPEDLAVMNPYNQVPVLVERDLVLHESNIINEYIDERFPHPQLMPGDPVMRGRGRLVLYRMEKELFNHVQVLENPAATNKEQAKAREAIGNGLTMLAPSFSKSKYILGEDFSMIDVALAPLLWRLGHYDVKLGKSAAPLLKYAERIFQREAFIEALTPAEKAMRK

SEQ ID NO: 11852 - protein, 213 aa, Glycine max
  unsure (1)..(213): unsure at all Xaa locations
QLRRPPPPHANLGDSNYSFGEAEALSDEMEEESQYVAEILRIKDVLLNPEDEATEIGKAVNPLRKHGSKDIRQLARTLINGWKEMVDEWVKATTTTAITGSEEGTPXSVNPSVVDDDEEEGLPSPPLDEGAFFVTQAGSMELSQFFDGMDDDGNPRPTGPFSKNHENGRKPAFDSHVLEMRKLQPSHDTVINRDVKSQQAKGKQGCCHACEAK

SEQ ID NO: 11853 - protein, 1208 aa, Magnaporthe grisea 70-15
MEVRPQARVPPRPVLEEASMRTNYSISQNSATPPNYQHGGLKTENIRPAQPQKTRRDIPVSSSHVPLNPRLYEIREEAQSTPQSKRESQASTASYKSSSSNTFRKPKTHVGPWQLGKTLGKGSSARVRLARHTSTHQYVAVKIVAKSTCKMTQAGSLAKLDEIDSAAPEKVEGMRRMPIALEREVAILKLIEHPNIVKLYDIWENSNEIYLILEYVERGDLFDFISKHGPMPEEEAIFVFRQIMSALEYCHSYGICHRDLKPENILLKSNGQVKIADFGMAALHQGPRTPLWTFCGSPHYAAPELLREKAYRGEKSDIWSMGVILFAMMAARLPFDDEDMNLMFAKARKAIYHMPSFFSDEAKDLIHRLLQVDPRKRLSMRQMWQHPVVWKYGYLDELGGEGIPEVPNPRTRQEIKPLDLCDIDPQILRPIQSMWHTLSEDELVKKLISDDYRERQLENYDPSLTHSPSDYHHIRPPLWLTKVSTRQFMTNKANGQGRSISKFTVISNVTETGTGANLGTVRSYDPYKSPAVKQPQATHARIVIHRDSTDTDRNAASLGSTSHRRPRANSTGSWKRPARRSQLGSRILTPRSTASSVQSSRKFHARSRTSSRQKRAMDFSTARRKAAAAKLSNQQTLLGTDGSKTVTGWNIQCSSDPDIPGDTADSSNARLRSKDRLHEELRHFSSSIAKDCDEAFNSSLLSVSQFDGDRSRQGSPFSLSLGTPVSATPVTPVVTPTIPRPSARPWDSRPLPPTPPSSSHEKESAVNFGENPSILARRGQPPTQGYNLRSGPVAMTPTPSDRRVVSAPVHGGQYGGCATGKLPSIEEATPNTIQDEVNRSRIVSLPAKPVATAPTSNEARGLEFLSNAEQTIRIVHSPSAQRESGITRRPHPIQANAKPSKMVGTSTGPVKQASIDLYHADDSIISHRNAQLAQTSSHGSASTFAMRKKTSSWFKRLSRESKGSKGSLCDELDDTKSIDVPHGLTSGPIKNERDNSSINMSHRPPEKTSNKKKSFFLPFWRHKSEPRMSLAEPDFEESPSPETNAAVKSHKTSGNNLLNFGDAESAERMIKPQQNWLARLFRVKPVTRVICLSISRRRARQEVAILLRDWRKYGIRDVEVDKKRNVVFARLSSKNHLNIKEVALACEIITVIEHGKRNHLSIVRFTQEKGAASSFQRVVDTMRDVLGNRNLLVTDKSKAKMMIKTLNS

SEQ ID NO: 11854 - protein, 222 aa, Zea mays
  unsure (1)..(222): unsure at all Xaa locations
MAGLSLEHPWAFAFGLLGNVISFMTFLAPIPTFYRIYKSKSTEGFQSVPYVVALFSAMLWIFYALIKSNETFLITINAAGCVIETIYIVMYFVYAPKKAKLFTAKIMALVNGGVFGVILLLTLLLFKGSKRRXLLGWICVGFSVSVFVAPLSIMRRVIQTRSVEYMPFSLSLSLTLSAVVWFLYGLLIQDKYPTLPNDLDIIFQVIQMELYVPYMNKKQAAG

SEQ ID NO: 11855 - protein, 251 aa, Zea mays
MRKKLGTRFPAARIKKIMQADEDVGKIALAVPVLVSRALELFLQDLIDRTYEITLQSGAKTLNSFHLKQCVKRYSSFDFLTEVVSKVPDLGGADSCGDERVLPRRRKSNGSDPENDESRSSKMAIRNANTSPRGRGRGRGRGRGRPPTKRKEVGYVQFEDESSMFAEQGETLPGEGTVPEINSGNEITPQSTQPPLTAPAQATNSKVEEASTDHQSDWPMPDATGNIGVGPSGFGHLTVQVDEDEDYDNED

SEQ ID NO: 11856 - protein, 443 aa, Cytophaga hutchinsonii
MGSIKISNANIVNEGQIFQADIWIEEGLIKQIGKITAIADQTIDASGKYLFPGVIDDQVHFREPGLTHKATIYTEAKAAVAGGVTSYMEMPNTKPAAVTQELLEQKYEIAAKTSLANYSFFMGTTNSNINELLKTNPATVCGIKIFMGSSTGDMLVDNSAMLDEIFSQVKMLIAIHAEEDPIVKANTEKYKALYGDKLNATHHHLIRSEEACYASSSKAVALAKKHGTRLHILHISTAKELDLFTNTIPLEEKKITAEACIHHLWFSNEDYATKGNYIKWNPAVKTVADREAIWQAVLDNRIDVIATDHAPHTIEEKELPYIDAPSGGPLVQHSLVAMLEKYHQGKISLERIAEKMSHNVAKLFQIEKRGFIREGYYADFALVDLNKPWMVEKKNIISKCGWSPFEGYIFKSTVTDTFVSGNWVFHEGTFNEEVKGSRLTFQR

SEQ ID NO: 11857 - protein, 267 aa, Novosphingobium aromaticivorans DSM 12444
MGFDRGRRGRGRDKRDGFGDEGGFDPYGGGGFGGGGYDRGGFGGGDRGGFGGGGRGGFGGGDRGGFGGGDRGGFGGGDRGGFGGGGGGRGGFGGPRGGGGGGGMPAQVVGTGKGVVKFFNGQKGFGFIQREDGGEDVFVHISAVERAGLEGLAEGQQLEFNLVDRGGKISAADLQVVGDVIPVAAKPASPQRELTGEKASGTVKFFNAMKGFGFITRDDGQPDAFVHISAVERSGLRELNEGDKLEFDLEVDRRGKYSAVNLVPRQD

SEQ ID NO: 11858 - protein, 175 aa, Triticum aestivum
MAPTVMASSATSVVPFQGLKSTVGLPVSRRSNGASLGSVSNGGRIRCMHVWPIEGIKKFETLSYLPPISTEALLKQVDYLIRSKWVPCLEYSKVGFIFREHNASPGYYDGRYWTMWKLPMFGCTDATQVINEVEEVNKEYPDAYVRIIGFDNMRQVQCVSFIAFKPPGCEESGKA

SEQ ID NO: 11859 - protein, 146 aa, Rickettsia rickettsii
ANEAVINMLKEIGSSEYIPKYIAKAKDKNDPFRLMGFGHRVYKNYDPRAVVLKETCKEVLRELGQLDNNPLLQIAIELEAIALKDEYFIERKLYPNVDFYSGIIYKAMGIPSQMFTVLFAIARTVGWMAQWKEMHEDPEQKISRPR

SEQ ID NO: 11860 - protein, 122 aa, Anthoceros formosae
MIQPQTYLNVADNSGARKLMCIRILGASNRKYGNIGDIIIAVTKEAVPNMPLKKSEVVRAVIVRTCKEVRRDNGMTIRFDDNVAATTNQEGNPKGTRVFGPVARESRGYNFTKIIPLAPEVL

SEQ ID NO: 11861 - protein, 236 aa, Oryza sativa (indica cultivar-group)
MAGADVDVGTELRLGLPGGGGGAAEAAAKAAKRGFEETIDLKLKLPTAGMEEAAAGKAEAPAAEKAKRPAEAAAADAEKPPAPKAQAVGWPPVRSFRRNIMTVQSVKSKKEEEADKQQQQPAANASGSNSSAFVKVSMDGAPYLRKVDLKMYNSYKDLSLALQKMFGTFTATGNNMNEVNGSDAGTTYEDKDGDWMLVGDVPWQMFVESCKRLRIMKGSEAIGLAPRAKDKYKNKS

SEQ ID NO: 11862 - protein, 123 aa, Pinus taeda
MAVKKMVEAVFVVGLVVTMMNVWGAVPVEGAISCNQVVSAMTPCATYLIGNAATPAATCCPSIRGLDSQVKATPDRQAVCNCLKTQAKSYGVKLGKAANLPGLCKVTDLNVPISPNVDCSKVH

SEQ ID NO: 11863 - protein, 449 aa, Methanococcoides burtonii DSM 6242
MNPATGEVNEEIELYSEERINRTITKARTTFLEWKNLDISERAHYLKTAATQLRKDKDELGRIITIEMGKPIKESVPEVEKCAWALEYYAENAENFLAPEAVETDALESGVSFEPKGVILSIMPWNFPFWQALRFAAPALVGGNTVILKHASSVPMCALAIEKVFADAGLPEGAFQTLIIDGRTASELIARDEIAAVTFTGSLTAGRKVAEAAGRNMKKAVLELGGSDPFIVLDDANVEMAAKAGVNSRFQNGGQSCIAAKRFIVTEAVADEFLRIFIGSARKLQVGDPMDPQTDVGPLVNAQQVDIIDAQVKDSVDKGAELLLEGGRLDRLGSFYAPVILSNVNENMRVLKEETFGPVAPVIIVKDEEEAIRVAGNSDFGLGASLWTEDREHAMEIEKHIESGILSVNSMVASDPRLPFGGVKKSGIGRELYKYGLYEFMNIKSIKVY

SEQ ID NO: 11864 - protein, 529 aa, Triticum aestivum
MAAAVKTSGGFCNTQQQWLHSTRDLFLHGSTRSNAKECKSRKTKKPTSLRVEATSTKVELDFNDPSWKQKFQEDWDNRFNLPRITDIYDLKPRPTTFSLMKQRTPTGDEDSTPMDMWKGYVNNDDRALMKVIKYSSPTSAGAECIDPDCSWVEQWVHRAGPRKDIYYEPNEVKAAIVTCGGLCPGLNDVIRQVVFTLETYGVKNIVGIPFGFRGFFEKGLKEMPLSRNLVENINLAGGSFLGVSRGGAKTSEIVDSIQARRIDMLFVLGGNGTHAGANAIHDECRKRKLKVSVVAVPKTIDNDIPLMDKTFGFDTAVEEAQRAINSAYIEARSAYHGIGLVKLMGRSSGFIAMHASLSSGQVDVCLIPEVSFALDGEYGVLQHLEQLIKNKGFCVVCVAEAAGQELLQNSGATDASGNAILSDIGVHMQQKIKTHFKGIGVHADIKYIDPTYMVRACRANASDAILCTVLGQNAVHGAFAGFSGITSCICNTHYVYLPVTQVITAPKRVNNKGRMWHRCLTSTGQPDFR

SEQ ID NO: 11865 - protein, 177 aa, Triticum aestivum
  unsure (1)..(177): unsure at all Xaa locations
MAPTVMASSATSVAPFQGLKSTAGLPVSRRSNGASLGSVSNGGRIRCMQVWPIEGIKKFETLSYLPPLSTEALLKQVDYLIRSKWVPCLEFSKVGFIFXREHNASPGYYDGXRYWDNVELPMFGCTDATXVINXVEESRRIPDPYVRIXXSTTCSRECVNLTLQATGARSGKAKSHH

SEQ ID NO: 11866 - protein, 427 aa, Triticum aestivum
  unsure (1)..(427): unsure at all Xaa locations
TRLRAAARSTSDVKPEEFAMLVRDVPVPPPNQTIKDSVDSYFRALHPDTFYKAMVVTDITKADQIFQEIEGHRHKIAHAEAVYAESKTSNRPEGTRPTHRTGFLGLIGKKVDTLEYCNEKIKELLPKLEDEQKSTLSEKQQRAAFVFFNSRAAAASASQTLHAQMFDEWTVTEAPEPRAVIWTNLPRKIYDRQTRQTVVYLIVFVTVVFYMIPITAISAVTTLEQLRKKLPFLKXVVDQPLLKTVLQAYLPQIALIVFLALLPTLLVFLSKSEGIPSQSHVVRASSGKYFYFIVFNVFIGYAIGSSLFSALQKVIENPTXIVTTLGSRLPGNATFFLTFVALKFFVGYGLELSRLVPLINFXLKRNYXCKTEDEVKXGWAPRELXYTTRVPNDLLIVTLVMCYSVIGPXLILHLGVAYLALGWLITK

SEQ ID NO: 11867 - protein, 215 aa, Bdellovibrio bacteriovorus HD100
MKFFIDTAEIEEIRQANLRGWVDGVTTNPSLIAKSGKDFHTVIKEICKEITGPVSAEVISLQHEEMVREGKELAKLASNVVVKIPMCEDGMIAVKKLKSEGIKTNVTLVFSPMQALLAAKAGATMVSPFVGRLDDIGVEGMQMVDQVIQMYRNYDFETEVLVASVRSPMHIQLAAEMGADIATIPFKVMQSMTHHPLTDKGIKMFMDDWNKAQKK

SEQ ID NO: 11868 - protein, 648 aa, Glycine max
  unsure (1)..(648): unsure at all Xaa locations
MSSAEKPSSKGQAWFCTTGLPSDIVVEVDDMTFHLHKFPLMSKSRKLHLLITQQEAASNSTVPQQQQQQQETEDEDEIVEEQCHVTFTGFPGGSEAFEMAAKFCYGVKIDLTPSNVAALRCAGEFLEMTEDYSEDNLVSKTEGFLSQHVLKNLKDSVKTLKSCDSLMPMAENLGAAQRCVDSVVSRASSADPALFGWPVSDATSVSKQVLWGGXTATADPALAPGPVSLGFEDLALLRLPLFKRLILAMRSAGLSPEIIETCLMYYAKKYIPGVSRSNRKPLPSSSSSSSSVATEAEQKELLETVVSNLLPSSSSSSSAATEALFEEIXRLVSNLPLACSYALEKKIGLHLEKXSLDDLLMPSYSYLNETLXDVDCAARSISHFLXLLKQKTSRNGGKRRARRSPGLMLVGKLIDGYLSEIASDANLKPEKFYNFAISVPDEARLFHDGLYRAVDVYLKAHPWVLEEEREKICGLLDCQKLTLEACTHAAQNERLPLRAVVQVLFFEQLQLRQAIAGTLMAAEAAAEPGRQSAALEREAEDGRGEGLGLEHVQERNGTWRVAVRENQVLRLDMDSMRTRVHQLERECSSMKRVISKFDKFAASGGGWRASLGRKFGCKFKTQVCDSHESTAVDTRKGRHHQQHHPHHD

SEQ ID NO: 11869 - protein, 118 aa, Glycine max
  unsure (1)..(118): unsure at all Xaa locations
MATLDSDVPMVPAGEPSSXSAGPSSKKPKRFEIKKWNAVXALWAWDIVVDNCAICRNHIMDLCIECQANQASATSEECTVAWGVCNHAFHFHCISRWLKTRQVCPLDNSEWEFQKYGH

SEQ ID NO: 11870 - protein, 258 aa, Triticum aestivum
MAMEARMKGTVKWFNDTKGFGFISPDDGSEDLFVHQSSIKADGFRSLAEGEVVEFAVSEGDDGRTKAVDVTGPDGSFVQGGAGGGGGGGGFGSRGGGGSRGGGGFGGRGGDGSGGYGGGYGGGGGGGWGGQRRSGGGGAGGACFKCGEPGHMARDCSVNGPAGGGGGGGCYKCGEQGHIARDCFNGGAGGGGGGYGGGGGGNCYNCGEPGHIARDCPTSSGFGGGGGGGRFGGGGGGGNDRSCYNCGEPGHISRDCTK

SEQ ID NO: 11871 - protein, 111 aa, Arabidopsis thaliana
MIRCGQKTIIFLINNGGYTIEVEIHDGPYNVIKNWNYTAFVEAIHNGEGKCWTAKVRCEEELVKAINTATNEEKESFCFIEVIVHKDDTSKELLEWGSRVSAANSRPPNPQ

SEQ ID NO: 11872 - protein, 476 aa, Brucella suis 1330
MYPNLTLIVGGEERNKGSAGTLCLTDPADGRELTIAPRAGRAEALQAAAAEKGFAEWSALSALERSKIMRRAADIMRERADAAARIMSMEQGKPLAEARGEWLGSADLLDWFAEEGRRVYGRIVPSRAPNIQIQVLKHPIGPVAAFTPWNFPAWNTMQKVAPALGAGCSVVIKPASDTPGTAWLIGKCLLEAGLPPKAVSVIWGTTSELSDALIKAPEFRKVSLTGSTRVGRIVAAQAGEYLKKVTMELGGHGPVIVAADADLDHLIPLAVQWKFRNCGQVCVSPTRFIVEASIHDEFIRRFSEKARELKVGKGVEEGTQMGPLTSQNQLETVLSMVEDALTKGAKIETGGNRIGDTGNFYEPTILSGMTAEMLAMNEEPFGPLALVMRVHSLDEAIAESNRLPVGLGAYLFTSSMTTAHRVQNHLQAGMLGVNHFALALPETPFGGVRDSGFGSEGGLEGIEAYLTTMTVTTMMV

SEQ ID NO: 11873 - protein, 1083 aa, Streptomyces coelicolor A3(2)
MSSDRDGIRGGWATPGDDQPDAESSVETTGEFTIDYAPPAWYTQNASGDGGQGESEGADPPGGSAGSPPASAPTAPPAPRGPVPPLPGLTPPPHATHHGPSYVPAPAPGAPFTPPPPAPAPGAAFTPPPPPGPGAPFTPPAPPSGGPAGVPKLPVGSGFEPQPSPSQRSAPPEPEPEPEVRTPEPEPKAVAEPAPAADLASPAALPSFPAGGFQLQAPVPPPPAEEPGAAAEPEPEPDREPDTGDLDNGDLESGATMRFSAVALKREIAERAAAEDTAGEGPAAGADEARDTPDEPFVSTGFTDADTDAETDVDTESDFESVSDQAPDAESGGGHGDVADPRLGGSAPDAEPEPEPESEPVVLAAVAESESESAERVGDEPEDSVPTADVPVDAVPDDAAPPADSVPQDAVPQDATPPAPEGMPPLPPSYPPVAPAAAHQWPAQPQPPTQPQTAPAPPEQPGVAAQQPPFQPQAPQPAPAGWDAPPAPQPGYGFPQPGAQAPQPQPHSPAQPPGGYGFPQAPQAPHGPSPQQQPYPGVPQQQAPQAQGGGQAPPAQPGQPAQPGQPMQPGQPGQSGQPGQAPSAPQAAPHPPQAPPAQQPEYQPQAQQPQPQPQPQPYQQPADPRLGAAWPQPMQHDQRQATNPGAAPLGYTAAVELSSDRLVNNKRQKAKSSRPAAGGSRFKLGGKKEEAERQRKLDLIRTPVLSCYRIAVISLKGGVGKTTTTTALGSTLATERQDKILAIDANPDAGTLGRRVRRETGATIRDLVQAIPYLNSYMDIRRFTSQASSGLEIIANDVDPAVSTTFNDEDYRRAIDVLGQQYPIILTDSGTGLLYSAMRGVLDLADQLIIISTPSVDGASSASTTLDWLSAHGYADLVSRSITVISGVRETGKMIKVDDIVGHFQTRCRGVVVVPFDEHLSAGAEVDLDMMRPKVREAYFNLAAMVAEDFVRHQQSHGLWTSDGNPPPVAAPPMPGQQTPGQQMPGQPMPGQPMPGQQMPPQQGQPMPPQPGQPVPGQPYPPQPAPGQQQPYPQPGYNQPYAQPGYGYPQPGQPGHPGQPQQQPQQQQQPQQGQTPPPPPPQQ

SEQ ID NO: 11874 - protein, 488 aa, Burkholderia cepacia R18194
MQTQLFIDGRFVDAVDRGTIDVLNPHDGSVITKIAAATAADVDLAVEAATRAFPKWSALPAAERGRLLLRLADAIEANAEELAQLESLDTGHPIRDSRALDVPRTAACFRYFGGMADKLQGSVIPVETGFLNYVQRAPIGVVGQIVPWNFPLMFTSWKMGPALAAGNTVVLKPSEITPLSTLRIVELMAEVGFPAGVVNIVPGYGHTAGQRLAEHPGVGKIAFTGSTATGRRIVEASQGNLKRVQLELGGKGANIVFDDADLDAAINGAAWAIFHNQGQACIAGSRLVLHERIADAFLERFVALASSIRIGNPLDANTEMGPLTSKQHLDRVLSFVDVAREQGGRVLTGGSAPQDPALANGYYVRPTVIEAKSAADRVAQEEVFGPFVTVLRFGSDDEALAIANATEYGLGSGLWTKDLSRAHKMASQINAGMCWINCYKRVNPGSPFGGVGQSGYGREMGFEAMHDYTEARSVWVNVDGNVPPHFKR

SEQ ID NO: 11875 - protein, 501 aa, Zea mays
  unsure (1)..(501): unsure at all Xaa locations
PTSTAAGGAGAPPQGVARPPGPRPLPLIGNLLDLRRAPGSLHHTLARLARAHGAPVMRLDLGLVPAVVVSSRDAAREAFAAHDRRIAARPVPDSKRALGFCDRSMLSLPSSAPLWRTLRGVMAAHVLSPRSLAASRAARERKVADLIGYLRARAGTVVDLKEAVYGGVANLVSTAMFSIDVVDVGAAESSSSSSSAAHGLQELLEELMQCMAQPNVSDLFPFLSALDLQGCRRRVAVQLGQVLQVLDDITDRRLASSSSSSTSSKGGDRRGDFLDILLDLQSTGKITRDNVTLTLFDIFAAGSDTMALTVVWAMAELLRNPGVMARLRAEVRDALGGRDAVEEARRGGPCRSWQAVVREAMRLHPXAPVLLPHKAVEDGVQIGGYAVPRGCTXVIFNSWXAIMRDPAAWERPDEFLPERFLARDLDFRGKQLEFVPFGSGRRLCPGVPMAERVVPLVLASLVHAFQWQLPAGMSADQVDVSDKFTTTSVLAFPPIKAVPLL

SEQ ID NO: 11876 - protein, 201 aa, Escherichia coli CFT073
MALHDENVVWHSHPVTPQQREQHHGHRGVVLWFTGLSGSGKSTVAGALEEALHKLGVSTYLLDGDNVRHGLCSDLGFSDADRKENIRRVGEVANLMVEAGLVVLTAFISPHRAERQMVRERVGEGRFIEVFVDTPLAICEARDPKGLYKKARAGELRNFTGIDSVYEAPESAEIHLNGEQLVTNLVQQLLDLLRQNDIIRS

SEQ ID NO: 11877 - protein, 238 aa, Lycopersicon esculentum
MADPDTTRTVVGIIGNVISFFLFLSPGPTFVQILKAKSVMEFKPDPYIATVLNCAVWVFYGMPFVHPDSLLVITINGFGLAIELLYVSIFFIYSDWSKRQKIIIALVIEAIFMAILIFVTLTFLHGTKDRSMLIGIVAIVFNIIMYTSPLTVMKKVITTKSVKYMPFYLSLANFANGIVWACYALLKFDPYILIPNGLGSLSGLVQLILFAAFYRTTNWDEDEKEVELSTSKSNKSDV

SEQ ID NO: 11878 - protein, 102 aa, Glycine max
  unsure (1)..(102): unsure at all Xaa locations
YIRVCLILAVLGCSDSFLSQQXVSVLELISQLVHRRSDWRALHQYADNHLAYQRLAIDDPAYGDQLLYNEDNTCVATVHGEIHTYEELRXTVXNHTFRTGSD

SEQ ID NO: 11879 - protein, 500 aa, Zea mays
MSSSPSFGLLAVAALLLALSLAQHGSLAATVGPRVIVVGAGMSGISAAKRLSEAGITDLLILEATDHIGGRMHKTNFAGINVELGANWVEGVNGGKMNPIWPIVNSTLKLRNFRSDFDYLAQNVYKEDGGVYDEDYVQKRIELADSVEEMGEKLSATLHASGRDDMSILAMQRLNEHQPNGPATPVDMVVDYYKFDYEFAEPPRVTSLQNTVPLATFSDFGDDVYFVADQRGYEAVVYYLAGQYLKTDDKSGKIVDPRLQLNKVVREIKYSPGGVTVKTEDNSVYSADYVMVSASLGVLQSDLIQFKPKLPTWKVRAIYQFDMAVYTKIFLKFPRKFWPEGKGREFFLYASSRRGYYGVWQEFEKQYPDANVLLVTVTDEESRRIEQQSDEQTKAEIMQVLRKMFPGKDVPDATDILVPRWWSDRFYKGTFSNWPVGVNRYEYDQLRAPVGRVYFTGEHTSEHYNGYVHGAYLSGIDSAEILINCAQKKMCKYHVQGKYD

SEQ ID NO: 11880 - protein, 449 aa, Oceanobacillus iheyensis HTE831
MEDLFELDKKHFIHPTSSIIQQQTDGAKSIMAKGDGIYVTDTNNKEYIDAVSSLWNVNIGHGRTELAEVASEQMKKLAFSSAFSTFSHEPAIRLAKKISELTPQGLNAVFFTSGGSESNDSAVKLSRHYWKIQNKASKRKIISLKRGYHGVAAASTSITGIPEFWDMAGHLMNDFLHAETPYRSTTEKAIESLQSMIEQETADTIAAIFVEPVQGAGGVLIPPADYLEAVREICDFYNILFIADEVITGFGRTGTMFGMENWNVVPDAMTFAKGVTSGYIPMGGVVVSDHIHTVLKEKSKGTLFHGFTYSGHPTAAAVALKNIEIIEKESLVTNAKERGLELQNGFQKIKKESSIVGEVRAIGLIGAIELMQDSATGQPFTPDVGVTPAVINALHERGVISRGVTYDGSNILCFAPPLIITKQEVNELISRISDAILFVQHQLGVSQNY

SEQ ID NO: 11881 - protein, 312 aa, Mesorhizobium loti MAFF303099
MTDYTKLIDAETWAFIERTNSYYPPDTIDYTITQQREIYDRMCREFFAGYPQGVTVETSAIATPTHDIPIRIYRSAPQPAATVLCIHGGGFMLGGLDSHDDVCAELCARTGYEVVSVDYRLAPEHLHPAAFDDAMTAFAWVASTRDRPILLCGDSAGGNLCAAVSHATRGHVKRPVGQVLIYPGLGGDRSKDSYVTHAEAPMLTMRDLEFYKHIRTGGQDRSGDATLAPLADTDFANLPPTVLVTAQCDPLSSDGETYRDRIIAAGGRATWFEEPGLVHGYLRARHTVGRARESFTRIVGAAAALGQGAWLW

SEQ ID NO: 11882 - protein, 503 aa, Ralstonia metallidurans CH34
MRDRTLVLSVLIVASCGLGYELIAGALSSYLLGDSILQFSSIIGCYLFAMGVGSWLSRYVKDEDVLTRFIDIEILVGLLGGISAALLFVVFAWLSAPFRTALYALVFVIGMLVGMEIPLVMRILNARRAQFSDLVSRVLTFDYLGALAVSLVFPLVLAPRLGLSRTGFLFGMLNVAVALFTLRIFRDEVSRTTLRTLRAGMVLAVLTVGFAGSNYLTHWAERGLFGDEIIHSETTPYQRLVITRWKDDLRLYINGNLQFSSRDEHRYHEALVHPVLQALPWARRVLVIGGGDGLALREILKYRNIEHVTLVDLDPAMTTLFSRSEPLRALNHGSLTDQRVTVVNADAAQWLEQNQDSFDAIIVDLPDPSNFGLGKLYSVPMYRLMSRHLAEKGYAVVQSTSPYYAPRSFWDIDATLREAGLHTWPYHTYVPSFGEWGYILVGKRNDYTPPTRYDVPMKFLDGDTTALMFRFPADMAPRQGEPNRLNEQTLVHDFERDWRNVIR

SEQ ID NO: 11883 - protein, 484 aa, Oceanobacillus iheyensis HTE831
MAELKAITTYQMYINGEFVNASNNETLEVTNPATEEIVSTVPKASLEDTRRAIDGSAKAQKDWANLPSSKRASYLFAISKEIRSNIDEYAKIISEEMGKPLDQAVVEVSVTADYFEYIAGWARKYEGEIVPSDREKENILVFKQPIGVVAGILPWNFPFFLIARKAAPAILTGNTIVLKPSSVSPNNALAFAKILDKVGLPKGVINIVTGAGSIVGEELSKNEKIGMISLTGSTEAGSRVMEKASKNITKVSLELGGKAPSIVMEDADIDLAVKSVLDSRIINTGQVCNCTERVYVHEDVADEFIEKITKAMSNVSYGNPLGNEQIDMGPLSNEAGLKNVEDMVKRAVENGATVLTGGNRVNTEAGYYYEPTVLSNVDNSFEIMKEEVFGPVLPIATFTSLDEAIELANDCQYGLTSAIFTNNVNYMMRASNELEFGETYVNRESFEAIQGFHAGWKKSGIGGADGKHGLGEFLQTHVVYIQYK

SEQ ID NO: 11884 - protein, 1233 aa, Neurospora crassa
MDNRTGSRVSVRQPLGDATNRANIAAMQTSSRPKLEANAKSWKNTNRSKSNPPIITDIPLVQHHIVTIPSPVAVPDVPSMSRLRHPSSLQQMNTQASDARRVSQFSNVSSNASITRLQKTHIGPWQLGKTLGKGASARVRLARHRTTHQLVAIKIVAKSTAHVTQATSMANLDRVDYRKPSISTDGVRRMPLAIEREVAILKLIQHPNIIKLHDIWENRQDIYLVTEYVEKGDLFDFINWNGSLNEEEAIFYYRQIMSALEYCHSFNICHRDLKPENILLKADGQIKIADFGMAALHQEPTHHLKTACGSPHYAAPELLKHQPYKGSAVDIWAMGVILFAMLAGRLPFDDSDMDAMLQRARKGYYKMPSELSREAKDLIRKILVVNPLQRITMKQMWKHPLIKKYDYVDDYQQSDGQPQDVLRNADIGPIPEKEVDPQILRQLKAMWHAYSEAQIKEKLGQTKPNDQKVFYWLLYRHRHAQLENYNNDIPISKSDFHHLKPPNWGKRISTCEFTQSSRNGHGRSISKFTVISNVAEVNDSGTVRSYDPYRASQVLRNCASEASHARIIVHRNPSEPGTRSNTSNIAHSYNSYTSFGGSFRRRPRMSSQRTNTTGRLRSSMGSMGSLRSLNGTPRVRANNRSRRGVDFSSIRARDRLQARVRENVRAAPSSAAGSSVVDRRNSCRQQQRQKAAIIHSADNTLKSRDETLIWDEELQQLGYRIAMDCDEAFRSSLVGSETSVAVSGSRENSPFSLSLGASSPSPQPESPTALPLQQQAVNHSWVNRPLPPIPSIEISPVVNQTYGVNVVRPAPLRIERLSLGNCASASQTLVPDRRIVSEPVYTTPANRDPRQLPSINETASEDWTRNASTRWASPDTPSPAENNKALNYLARAENTIRVVNSPTAGPVPMPEPLNVRKVSKATPAASGESNYRKTALSNIPPDFKENCPPGTQQEEQGVGDNTVNAGAPAKKRVPSWFRRSSKDNTSFATTANTAAIHNDSTIISDIHQQLDGLESQSSARPDPYPNKKKAFSLAFWKGSKSENSSPTASTFDISTSKEGGGKKHKSSKSESRVVSGATSQSWGEGEGVGRQIEVQQNWLARLFRVKPATRHLCFSMPRRRARQEVAILLREWRQFGIKDVEVDKERNIIFARVGAQNVHNVKEVSFAIEIMMVIEHGKRNQRTQLSIARFTQEKGAASSFHKVVDAINVEFRNRGLLVTDKRKTQMMIKTLNS

SEQ ID NO: 11885 - protein, 427 aa, Azotobacter vinelandii
MPFTANRDFQRDPRLVVAARGNYLTDAEGRQVYDSLSGLWCCGAGHGRREIAEAVTRQLGTLDYSPGFQFGHPLSFRLAEKIASLTPAGLDHVFFTNSGSECADTALKIARAYWRLKGKAGKTRLIGRARGYHGVNLGGTAVGGIGGNRKAFGPLSDVDHLPHTLLAENAFSRGLPAHGGAALADALLGLIELHDASNIAALIVEPMSGSAGVLVPPEGYLARLREICDRHEILLIFDEVITGFGRTGALFGAERFGVTPDILNLAKQLTNGAAPMGAVLVKGEIYDTFMRQELPEHAVEFAHGYTYSAHPVACAAALATLELLERDNLLQRAAELAPHFENALHGLRGARHLLDIRNCGLAGALQLAPRDGDALVRPFEAAMRLWRRGFYVRCGGDTLQFGPPFSSSAAELDRLFDAVGEVLGGLD

SEQ ID NO: 11886 - protein, 350 aa, Bacillus cereus ATCC 10987
MKALLWHNQRDVRVEEVPEPTVKPGAVKIKVKWCGICGTDLHEYLAGPIFIPKEEHPLTHVKAPVILGHEFSGEVVEIGEGVTSHKVGDRVVVEPIYSCGKCEACKHGHYNVCEQLVFHGLGGEGGGFSEYTVVPEDMVHHIPDEMTYEQGALVEPAAVAVHAVRQSKLKEGEAVAVFGCGPIGLLVIQAAKAAGATPVIAVELSKERQELAKLAGADYVLNPATQDVLAEIRNLTNGLGVNVSFEVTGVEVVLRQAIESTSFEGQTVIVSVWEKDATITPNNLVLKEKEVVGILGYRHIFPAVIKLISSGQIQAEKLITKKITVDQVVEEGFEALVKDKTQVKILVSPK

SEQ ID NO: 11887 - protein, 484 aa, Corynebacterium glutamicum ATCC 13032
MTATFAGIDATKHLIGGQWVEGNSDRISTNINPYDDSVIAESKQASIADVDAAYEAAKKAQAEWAATPAAERSAIIYRAAELLEEHREEIVEWLIKESGSTRSKANLEITLAGNITKESASFPGRVHGRISPSNTPGKENRVYRVAKGVVGVISPWNFPLNLSIRSVAPALAVGNAVVIKPASDTPVTGGVIPARIFEEAGVPAGVISTVAGAGSEIGDHFVTHAVPKLISFTGSTPVGRRVGELAINGGPMKTVALELGGNAPFVVLADADIDAAAQAAAVGAFLHQGQICMSINRVIVDAAVHDEFLEKFVEAVKNIPTGDPSAEGTLVGPVINDSQLSGLKEKIELAKKEGATVQVEGPIEGRLVHPHVFSDVTSDMEIAREEIFGPLISVLKADDEAHAAELANASDFGLSAAVWSKDIDRAAQFALQIDSGMVHINDLTVNDEPHVMFGGSKNSGLGRFNGDWAIEEFTTDRWIGIKRS

SEQ ID NO: 11888 - protein, 345 aa, Glycine max
SSQLRRPPPQKKKKKGLTRRKNLPLTVYNKLSIAVAFSLPLRIFFFFFSSNPKSWPRKLTTKVIELNTLKAMAQSHGSILTRSVWSSNLESEFDLIRSVIDSFPLISMDTEFPGVVVRPDAGDPSFRHRQPVAHYAVLKANVDRLHLIQIGLTLSDNAGNLPTLGTSNAFIWEFNFKDFDVARDAHAHDSVELLRRQGIDFEKNRDFGIDSFRFAELMMSSGLVCDDAVSWVTFHSAYDFGYLVKLMTHRTLPEELREFLRLVRVFFGDRVFDVKHLMRFCSNLHGGLDRVCQSLKVERVIGKSHQAGSDSLLTLHAFQNIRENYFDKADGLVQYAGVLYGLEVF

SEQ ID NO: 11889 - protein, 363 aa, Shigella flexneri
MSKNYHIAVLPGDGIGPEVMTQALKVLNAVRNRFAMRITTSHYDVGGAAIDNHGQPLPPATVEGCEQADAVLFGSVGGPKWEHLPPDQQPERGALLPLRKHFKLFSNLRPAKLYQGLEAFCPLRADIAANGFDIQCVRELTGGIYFGQPKGREGSGQYEKAFDTEVYHRFEIERIARIAFESARKRRHKVTSIDKANVLQSSILWREIVNEIATEYPDVELAHMYIDNATMQLIKDPSQFDVLLCSNLFGDILSDECAMITGSMGMLPSASLNEQGFGLYEPAGGSAPDIAGKNIANPIAQILSLALLLRYSLDADDAASAIERAINRALEEGIRTGDLARGAAAVSTDEMGDIIARYVAEGV

SEQ ID NO: 11890 - protein, 460 aa, Lycopersicon esculentum
MDSSWEASVTDSINAIYLLFSAYLVFVMQLGFAMLCAGSVRAKNAMNIMLTNVVDAVVGSLSYYLFGFAFAFGDSNPFIGASYFALKDIPSSSYDYSFFLYQWAFAIAVAGITSGSIAERTQFTAYLVFSFFLTGFVYPVVAHWLWSSNGWLSPNSTYLLFGSGAIDFAGSGVVHLVGGIAGFWGSIVEGPRVGRFDAFGNPVKMRGHNATLVVLGTLLLWFGWFGFNPGSFNKILVAYPHMADQGNWTSVGRTAVTTTLAGSTAGIVTLFGRRLLVGHWDAMDVCNGVLGGFVAITSGCSVVEPWAAILCGFCAAWVLIGLNILALKFKFDDPLEAAQLHGGCGAWGLIFTGLFAKEEFVLQAYNSGKTQIIRPSGLILGGGWGLFGAQIVELLSIVVWVSLTMGPLFYLLQKLGILRISSDEEVAGLDISSHGGYAYDASQEESNARFYGEYLRMQQQ

SEQ ID NO: 11891 - protein, 271 aa, Ulva intestinalis
MLRAIAQRARGSALQCAAPGTEWASCVRGSSGFTAYDVGESTNIKWHETMVSRGDKERLLNQRGCVLWFTGLSGSGKSTVACTLEHALNARGKMTALLDGDNVRHGLNSNLTFTAEDRTEHPPHRRSEQALCRRWRPPLRELHLRPIAPTRPVRERCAGDFVECYMKIPIELCEQRDPKGLYKKARAGLMKGFTGIDDPYEEPLEPELTITVREEGSDMNSPEAMAKQIFDYLEAKGFLKGPAVASSGGSCARVARWGGHGRRRGRQRLAW

SEQ ID NO: 11892 - protein, 126 aa, Brassica napus
  unsure (1)..(126): unsure at all Xaa locations
MERLNARLAVLSAHLEVSDPMPAATEPWCKSIAGPLAGNLTIVDERTGKKYQVPXVSEEGTVKSIDLKKITSGAHDKGIKLYDPGYLNTAPVRSSVSCTDGDEGTLRYRGYLIEELGESSTFFWGA

SEQ ID NO: 11893 - protein, 287 aa, Zea mays
  unsure (1)..(287): unsure at all Xaa locations
PFPQPRRVASYDPKLSLLRRSQPWPKNYPTVSAEYSEAVREGQAASLRALIAEKSCAPLMLRLAWHSAGTFDVSSRTGGPFGTMKHQSELAHGANAGLDXIAVRLLEPIKEEFXILSYADFYQLAGVVAVEVTGGPEIPFHPGREDKPQPPPEGRLPDATXGSDHLRQVFGKQMGLXSDQDIVALSGGHTLXGRCHKERSGFRGXPWTTNPFGSFDNSYFXELSEWVIKEGXLLQLPSDKALLSDPVFPPSCREICWADEKAFFDDYKEAHLKLSRTGVSNHWLHNV

SEQ ID NO: 11894 - protein, 527 aa, Zea mays
MAMAMMAMRRAVALGARHIPAAAASSFRVVSLRHMSADAGAAMEKIRAAGLLRTQGLIAGQWVDAYDGKTIEVQNPATGEVLANVSCMGSRETSDAIASAHSTFYSWSKFTASERSKALRKWYDLIISHKEELALLMTLEQGKPMKEALGEVNYGASFIEYFAEEAKRIYGDIIPPTLSDRRLLVLKQPVGVVGAITPWNFPLAMITRKVGPALACGCTVVVKPSEFTPLTALAAADLALQAGIPAGALNVVMGNAAEIGDALLQSTQVRKITFTGSTAVGKKLMAGSANTVKKVSLELGGNAPCIVFDDADIDVAVKGSLAAKFRNSGQTCVCANRILVQEGIYEKFAKAFIQAVQSLKVGNGLEESTSQGPLINEAAVQKVEKFINDATSKGANVMLGGKRHSLGMSFYEPTVVGNVSNDMLLFREEVFGPVAPLIPFKTEEEAVHMANDTNTGLAAYIFTKSIPRSWRVSESLEYGLVGVNEGIISTEVAPFGGVKQSGLGREGSKYGIDEYLELKYICMGNLG

SEQ ID NO: 11895 - protein, 174 aa, Glycine max
MSDAPASPSHESGGEQSPRGSLSGAAREQDRYLPIANISRIMKKALPPNGKIAKDAKDTMQECVSEFISFITSEASEKCQKEKRKTINGDDLLWAMATLGFEDYIEPLKVYLARYREAEGDTKGSARSGDGSARPDQVGLAGQNAQLVHQGSLNYIGLQVQPQHLVMPSMQGHE

SEQ ID NO: 11896 - protein, 244 aa, Zea mays
  unsure (1)..(244): unsure at all Xaa locations
RKHCPPSSVPSRRVACSSSAADADVVDLFDAAKLTVDKFVTSGMVVGLGSGPASALAIQYLGTRLRRGSLTGITAVTXPRSVLSASEADKAGIRANSYQEGTQXGEEGTLAAVIGRRRTRXGEPSFMAEKAMAKSAHKLAFIXXNDKYVTTGVEGSIPVLIKKVWRRPSFGTAGPLGGDHPLVTKEGHHVLDVIFTTPIQDLGQVAEKLDKVDGVVDHGIICSNQPYAVIASKGEVQVLDEKSS

SEQ ID NO: 11897 - protein, 137 aa, Gossypium barbadense
MAEEHRCQAPQLCANNCGFFGSPTTQNLCSECYRGLQLKEQQSSSAKQAFNHTLVPSSSSLPSSSSARSSFSASLPAKEEPSAGTKETKVVEEEEVQVTPNRCLSCKKRVGLTGFKCRCGMVFCGIHRYPGTTCLCF

SEQ ID NO: 11898 - protein, 113 aa, Zea mays
  unsure (1)..(113): unsure at all Xaa locations
GADQAVRQPFQSRFDLLLLLAGPNTTRLASKLARGPTVIMASSETAVAPFKGLKSAAGFPVSRRRTRSLGNLRNGGGIRSMQVWPAYGTKKFKTLSYLPPXLSTDNLLKQVDY

SEQ ID NO: 11899 - protein, 441 aa, Pseudomonas putida
MALTREQQIAALEKDWAENPRWKGVTRTYTAADVVRLRGSLQPEHTLARQGAEKLWKLVTQGAHPSFRPEKDFVNCMGALTGGQAVQQVKAGIQAIYLSGWQVAADNNSAESMYPDQSLYPVDSVPTVVKRINNSFRRADQIQWKAGKNPGDKGYIDYFAPIVADAEAGFGGVLNAYELMKNMIEAGAAGVHFEDQLASVKKCGHMGGKVLVPTQEAVQKLVAARLAADVSGVPTIILARTDANAADLLTSDCDPYDQPFVIGERTREGFYKVRAGLDQAISRGLAYAPYADLIWCETAKPDLDEARRFAEAIKKEYPDQILSYNCSPSFNWKKNLDDATIAKFQRELSAMGYKHQFITLAGIHNMWHGMFNLAHDYARNDMTAYVKLQEQEFADASKGYTFVAHQQEVGTGYFDDMTTVIQGGASSVTALTGSTEEEQFH

SEQ ID NO: 11900 - protein, 114 aa, Capsicum annuum
MEMVSKIACLVVLCMVVAAPHAEALTCGQVAGDLAACLPYLQGSGPLGSCCGGVRALLGAAKTPADRKTACTCLKSAANAIKGINLSKAAGLPTACGVNIPYKISPSTDCSTVQ

SEQ ID NO: 11901 - protein, 135 aa, Brassica napus
MGEVVEIMFGNGFPEIHKDTSPIQTLHSNQQECHWYEETIDDDLKWSFALNSVLHKGTSEYQDIALLDTKRFGKVLVIDGKMQSAERDEFIYHECLIHPALLCHPNPKTVFIMGGGEGSAARQILKHKTIEKVVM

SEQ ID NO: 11902 - protein, 151 aa, Picea abies
MAMDPLLSTVQQLLGVPDDLERILHAPTRSYMRDTEATASTPVDVKEYPNSYVFIVDMPGLKSNDIKVQVEDENVLNISGERKRNEKEEGEVKYIRMERRVAKFMRKFSLPADCNLEAISAACQDGVLTVTVPKLPPPEPKKPKTIAVKIG

SEQ ID NO: 11903 - protein, 436 aa, Triticum aestivum
  unsure (1)..(436): unsure at all Xaa locations
RRSVPPLPYPSPPPAPASPPAPSPPPVPPRRGAAASAPLLHRGLDHPPAGRLPPPRRRLLRRPRRPPRRPPAPPRALALSPRLPPRTAWWTRVVRFVGYVPVAKRSRIVDLSRGFRQRGPDGSGVHSFVDXELAHHRLPKAKLTSDHHPLYNEGKTVVVTVNGEIYNHEELKAKLKSHQFQTGSDCEVIAHLYEECGGPLYMGWGLDGSVGLPAAREACCVAARRAIGICPLYMGWGLDGSVWFSSEMKALSDDCERFISFPPGHLYSSKTGGLRRWYNPPWFSESIPSAPYDPLLIRESFEKAVITRLMTDXLMTDVPFGVLLSGGLDSSLVASVVSRYLAETKVARQWGNKLHTFCIGLKGXPDLKAAKEVADYLCTVHHEIHFTVQEGIDAXLEEVLYHIQTYDVTTIRASPPIVSNVSGKINSWGVKNGLFR

SEQ ID NO: 11904 - protein, 396 aa, Pseudomonas syringae pv. syringae B728a
MTTQMLRKRICVLPGDGIGIEVMEAALPVIAALNLPFDLVPADIGWQCWRAEGETVPARTWEIMASCDATLLGAITSKPLAEAEAELPLTLQGQNRRYVSPVIQLRQNLDLYANVRPVTDMTGENRFRFVVIRENTEGLYAGLDFGCIPDALVPLLEEREALGAAWQREGQDDATVTLRLQTRSGLMRIFEYAFEYARKNHFTRVTFVDKPMVLRHSSAFARGIFEATAQRYPDVSGVIENVDAVALWMVQRPERFGVIVAENMFGDILSDLGAGVMGGLGFAPSGNFGNSGAYFEPVHGSAPAHAGLNKANPGAMFMAIALMLEHLGFPTESACISQAVSLVSRTSTRTYDLGGSHTTAQVGEAIVQQCIELQSRTFGYRNEQASAPGERHVSAL

SEQ ID NO: 11905 - protein, 138 aa, Magnaporthe grisea 70-15
MSDNEFGANDDLSLPKATVQKIVSEILPQSDGITYSKEARDLLIECCVEFITLISSEANEISDKEAKKTIACDHITKALEVLGFSEYVPAVLEAAAEHKEVQKGREKKANKFEQSGLSLEELERIQAEEFAKAASRHH

SEQ ID NO: 11906 - protein, 303 aa, Blumeria graminis
MKNLLAESLIEAICAKTKELLMQESNVVHIQAPVTVVGDIHGQFYDLIEIFKIGGFCPDTNYLFLGDYVDRGMFSVETISLLVCLKLRYPHRVHLIRGNHESRGVTQSYGFYTECSRKYGNANVWHFFTDMFDFLTLSVVINDQIFCVHGGLSPSIHSIDQIKVIDRYREIPHEGPMADLVWSDPDPERDEFSLSPRGAGYTFGAEVVKKFLAVNNMTHILRAHQLCQEGYQVLYDDRLSTVWSAPNYCYRCGNMASVLEVSDLGERFFNVFAAAPENDFLKGDLHNGTEKVSDGNSLPDYFL

SEQ ID NO: 11907 - protein, 349 aa, Bacillus sp. KSM-K16
MRAAVWYKEKDIRVEEREPAKLGARDVKVRVAWAGICGSDLHEYLHGPVIIPKGEPDPITGGESPLTLGHEFAGVIEEVGTEVKSFQKGDRVVINPLFTYGNKPASVDLYDGFSFAGLATDGGFADFAVLPEKNVYKLPDNLTLEEGALVEPMAVAVQAVKEADFKFGQSVAVFGAGPIGLFTIIAAKAAGASKIIVFDLSEERLEKARLVGATHTFNSGAVDPVEKVKSLVPDGVDVSFEVAGVNATFNQSIQVAKSRGVVVVVSIFAKPIEFNPMDLTGSGVKITSTLAYEPEVFQTTIDLMAEGALNPKGVITDRIELENIVESGFEVLTNDKRQAKILVKLSGEK

SEQ ID NO: 11908 - protein, 463 aa, Ralstonia metallidurans CH34
MPNLTTDHIDMLRHAVRGKVLLPADAGYETARTVWNATVDRRPAIIVQCSGTADVMQAVGFARDRGLVLAVRGGGHNIAGSAICNGGLVIDLSQLRTVHVDPLERVAWVSPGATLADFDHEAQAQGLATPLGINSTTGVAGLTLGGGFGWLTRKYGMTVDNLLGCEIVTADGTRHWTDSRHEPELFWALRGGGGNFGVVTLFQFRLHPVGPMITAGLLVFPAVEAKAVLRQYRAYVESTMPEDLNVWVVLRKAPPLPFLPASAHGKDVVVLAVFHDGDPAAAEKAIEPLRKFGETVGEHVGQMPYTAWQQAFDALLGPGARNYWKSHNFTRLEDGAIDAMTDFALRLPSPLADIFVGQVGGVANRVAPDATAYHHRDARYVLNVHARWERPDEDAACIAWARDFFRATETFATGGVYVNFLTDDETARIGAAYGPNYARLAQIKRTYDPQNLFSTNQNIAPAS

SEQ ID NO: 11909 - protein, 239 aa, Brassica napus
MGEESEAFATTAPLAPVTGERKVRNDLEETLPKPYLARALVAPDTEHPNGSEGHDSKGMSVMQQHVAFFDQNGDGIVYPWETYAGFRDLGFNPISSVFWAIFINFAFSYVTLPSWLPSPLLPVYIDNIHKAKHGSDSSTYDTEGRYVPVNLENIFSKYALTAPNKITLKELWNLTEGNRMAIDPFGWLANKVEWLLVYLLAKDEEGFVSKEAVRGVFDASFFEYCAKKNKEKADSRKQD

SEQ ID NO: 11910 - protein, 370 aa, Azotobacter vinelandii
MALSGTAAGNTALCTVGRTGNDLHYRGYDILDFATTCEFEEVAHLLVHGKLPNVAELNGYKAKLKSLRGLPAGVKAALEQLPPSSHPMDVMRTGVSVLGCLSPEKEDHNYPGARDIADKLMASLGSMLLYWYHFSHNGKRIDVETDDDSIGGHFLHLLHGKKPSDSWVRAMHTSLILYAEHEFNASTFTSRVISGTGSDMFSCITGAIGALRGPKHGGANEVAFEIQKRYDTPDEAEADIRARVERKEVVIGFGHPVYTVGDPRNKVIKEVARELSVEQGNTKMYDIAERLESVMWEIKKMFPNLDWFSAVSYHMMGIPTAMFTPVFVIARTSGWAAHAIEQRIDGKIIRPSANYVGPENLKFVPLRERK

SEQ ID NO: 11911 - protein, 230 aa, Lotus corniculatus
MTVAGYLNIGDFIPPLEWLDLQGVQGKMKKLHNRFDAFFAHIIEEQKVILKSEKHQDLLSTLLSLKEAPEDGDKLNDTEIKALLLNLFTAGTDTSSSTAEWAIAELIKNPRIMGQVQQELDNVVGKDKLVTELDMPNLPYLEAVVKETFRLHPSTPLSLPRAAAKSCEVFDYHIPKGATLLVNVWAISRDPKEWASPLEFRPERFLPGGEKASVDVRGTDFALIPFGAGR

SEQ ID NO: 11912 - protein, 353 aa, Aegilops triuncialis
MKTFLVFALLAIAATSAIAQMETSRVPGLEKPWQQQPLPPQQQPPCSQQQQPFPQQQQPIIILQQSPFSQQQQPVLPQQQPVIILQQPPFSQQQQPVLPQQPPFSQQQQQQQQQQQQQPPFSQQQQPVLPQQPPFSQQQQPPFSQQQQPSSQQPPFPQQHQQFPQQQIPVVQPSVLQQLNPCKVFLQQQCSHVAMSQRLARSQMWQQSSCHVMQQQCCQQLPQIPEQSRSEAIRAIVYSIILQEQQQGFVQPQQQQPQQSGQGVSQHQQQSQQQQQLGQCSFQQPQQLQQLGQQPQQQQIPQGIFLQPHQISQLEVMTSIALRTLPTMCGVNVPLYSSTTIMPFSIGTGVGGY

SEQ ID NO: 11913 - protein, 277 aa, Glycine max
  unsure (1)..(277): unsure at all Xaa locations
HVEELLPVVYTPTVGEACQKYGSIFMHPQGLYISLKEKGKIREVLRNWPEKNIQVIVVTDGERILGLGDLGCQGMGIPVGKLSLYTALGGVRPSACLPITIDVGTNNEKLLNDELYIGLKQRRATGQEYAELMHEFMTAVKQTYGEKVLIQFEDFANHNAFDLLEKYRSTHLVFNDDIQGTASVVLAGLVAALKLVGGNLADHRFLFLGAGEAGTGIAELIALETSKQTNAPLEEVRKNIWLVDSKGLIVSSRKDSLQHFKXPWAHEHEPVRNLVDA

SEQ ID NO: 11914 - protein, 162 aa, Triticum aestivum
  unsure (1)..(162): unsure at all Xaa locations
MAPTVMASSATSVAPFQGLKSTAGLPVSRRSNGASLGSVSNGGRIRCMQVWPIEGIKKFETLSYLPPLSTEALLKQVDYLIRSKWVPCLEFNKXWVHPPVNNNASLGYYDGRYWDNVESLPNFGCTGPTQVXXLEGXQEGLPDAYFRIIGSTTXRQVQCVSS

SEQ ID NO: 11915 - protein, 483 aa, Ustilago maydis 521
MAPVAVTESTPIAPTAAKLNGAATHNGDMNGTITNTTGPSLFGSNTSAVLHGAKDLRIEERPYAAPIGDEVQIRVRATGLCGSDLHYYLHGRNGDFALQHSMCLGHESAGEIVAVGPNVPASLGLAVGDRVAIEAGRFCGSCLKCRDGRYNLCKQMRFASSAKTHPHLDGTLQKYMNWPSWLVHKLPANVSLTSAALCEPLSVVLQGIRRSQLQPGQSVLVYGAGAVGLLACAAAKASGASFVAAVDIDQGRLAFAAANGWADATYLLPRAAPAAVDGEQTNVGARRAAEDKAAISSASASAASLLKALSSSDPSSSQQTSYAIQPAPLDLSSEGFDVVFECTGVPTCVQTGIFATKAGGKVVLIGMGNPIQTLPVGSASLREVDIVGVFRYANTYPVALGLLAGGTLRAQGGGLHAQAVGLPTNLDTNEGHGPGRKMGGIENLVSHTFPLKHAIKAFETLANGKDPEHGRGVVKVFITDDDA

SEQ ID NO: 11916 - protein, 463 aa, Methanocaldococcus jannaschii
  unsure (1)..(463): unsure at all Xaa locations
MFIDGKWINREDMDVINPYSLEVIKKIPALSREEAKEAIDTAEKYKEVMKNLPITKRYNILMNIAKQIKEKKEELAKILAIDAGKPIKQARVEVERSIGTFKLAAFYVKEHRDEVIPSDDRLIFTRREPVGIVGAITPFNFPLNLSAHKIAPAIATGNVIVHHPSSKAPLVCIELAKIIENALKKYNVPLGVYNLLTGAGEVVGDEIVVNEKVNMISFTGSSKVGELITKKAGFKKIALELGGVNPNIVLKDADLNKAVNALIKGSFIYAGQVCISVGMILVDESIADKFIEMFVNKAKVLNVGNPLDEKTDVGPLISVEHAEWVEKVVEKAIDEGGKLLLGGKRDKALFYPTILEVDRDNILCKTETFAPVIPIIRTNEEEMIDIANSTEYGLHSAIFTNDINKSLKFAENLEFGGVVINDSSLFRQDNMPFGGVKKSGLGREGVKYAMEEMSNIXTIIISK

SEQ ID NO: 11917 - protein, 493 aa, Corynebacterium glutamicum
MTVTTPTTYSAIVADQLYIGGWREGTSERIATTTNPFNDETIATIRQASPDDVDAAYEIAKESQAVWAALAPKERVHILTKAADWIEENQEAVIELIRVESGSTAIKATIETSLAVGSLREAATFPTRITGQILPSNTPGKANYVFREALGVVGVISPWNFPFALSMRSVAPALACGNAVVVKPASDTPLTGGLLLGKIFEAAGLPEGVLNIVVGSGSEIGDHFVEHPIPRLISFTGSTPVGKQVGATATGGKHIKKVALELGGNAPLVVLEDADLDQAVGAAAMGKFLHQGQICMAVNRIIVQAPLYDEFVEAFAKRVQTLAYGDQCDDATVVGPVINDSQLHSVTKKIERARIEGAREVVSGPIEGRVIAPHVFADVTPAMELFREEIFGPVVGIIKAKDEAHALELANDTEFGLSSAVYTRDLARGLNFARQVEAGMTHVNDITVNDEAHVMFGGEKNSGLGRFNGEWAIEEFTTTHWVGVAPGQAQFPF

SEQ ID NO: 11918 - protein, 205 aa, Schizosaccharomyces pombe
MAMFSLEIPAISAETSKKLVVVGDGGCGKTCLLIVFSSGTFPERYVPTVFENYITDITYGPNSKVIELALWDTAGQEEYDRLRPLSYPNSNVILLCFSIDCPASLNNVTEKWYPEVQHFCPRTPIVLVGLKADLRKDRNATEVLRTQGLTPVTYQQAQSVALSMNAPYVECSAKENTGVNEVFQLAVGLTIKKSFSFSKKSCVIL

SEQ ID NO: 11919 - protein, 475 aa, Streptomyces coelicolor A3(2)
MSLHQGPRPSRDSDRDRRRLAVNPFHAAANPLGGMTEAPPAHRLPDSPLPPESAYRLVHDELMLDGNARLNLATFVTTWMEPQAGVLMSECRDKNMIDKDEYPRTAELERRCVAMLADLWHAPDPSTAVGCSTTGSSEACMLAGMALKRRWALRNADRYPAKDVRPNLVMGVNVQVCWDKFCNFWEVEARQVPMEGDRFHLDPQAAAELCDENTIGVVGILGSTFDGSYEPVADLCAALDALQERTGLDVPVHVDGASGAMVAPFLDEDLVWDFRLPRVASINTSGHKYGLVYPGVGWALWRDAEALPEELVFRVNYLGGDMPTFALNFSRPGAQVVAQYYNFLRLGREGYRAVQQSARDIAGSLAERVAALGDFRLLTRGDQLPVFAFTTADDVTAYDVFDVSRRLREGGWLVPAYTFPPHREDLSVLRVVCRNGFSADMADLLLADLERLLPELRRQPGPLTRDKGAATGFHH

SEQ ID NO: 11920 - protein, 81 aa, Glycine max
SNSYTRAVHQLSHRARGTAWLHPYTGLKSMAGLPTRKTNTDITSIASNGGRVQCMQVRPPAGSMKFETLSYLPDLDDAQLA

SEQ ID NO: 11921 - protein, 509 aa, Brassica juncea
MTSVNVKLLYHYVITNLFNLCFFPLTAIVAGKAYRFTIDDLHHLYYSYLQHNLITIASLFAFTVSGFGLYIATLPKPLYLVEYSCYLPPRHLKVSVSKIMDIFYQIKADTSSRNVACDDPSSLDFLRKIQERSGLGDETYSPEGLIHVPPRKSFAGSREETEKVIIGGIENLFENTKVKPKDIGILVVNSSKFNPTPSLSAMVVNTFKLRSNIKSFNLGGMGCSAGVIAIAIDLAKDLLHVHKNTYALVVSTEGITQGIYAEENRSMMFSNCLFRVGGAAILLSNKSGDRRRSKYELVHTVRTHTGADDKSFRCVQQGDDEDGKTGVCLSKDITNVAGTTLTKHIAICRPLILPLSEKFLFFATSVAMKLLKDKIKHYYVPDFKLAVDHFCIQPGGRAVIDELEKNLGLSPIDVEASRSTLHRFGNTSSSSIWYELAYIEPKERLKKGNKKGWQIALGLGFKGNSAVWVALNNVKASANSPWEHCIDRYPVKNDSDLSKSKTQVQNGRS

SEQ ID NO: 11922 - protein, 173 aa, Zea mays
  unsure (1)..(173): unsure at all Xaa locations
MCDNKGNSEGHSTLLLGKYELGRVLGHGTFAKVYHARNLQTGKNVAMKVVGKEKVIKVGMMEQIKREIAVMKMVKHPNIVELHEVMATKSKIYIAMELVRGGELFNKVAKGRLKEDIARVYFQQLISAIDFFHSRGVYHRDLRPENLLLDEHGNLKVXDFGLSTFSEHLXQDG

SEQ ID NO: 11923 - protein, 324 aa, Glycine max
MATLVLYQFFLKLLLLISVFQLSFAARRLNQLVQDQSQLLHYHNGPLLYGKIAVNLIWYGHFKPSQKAIITDFVTSLSSPSSQSSQPSVATWWKTTEKYYHLSPKNKKAASSLSLSLGDQFLDEGFSLGKSLTSKNLVELASKGGQRNAINVVLTSADVAVEGFCMSRCGTHGSSSSASHVKKNNNGKNYKFAYIWVGNSETQCPGQCAWPFHQPIYGPQSPPLVAPNNDVGLDGMVINLASLLAGTATNPFGNGYFQGPAEAPLEAASACPGVYGKGAYPGYAGNLLVDSATGASYNVEGDNGRKYLVPALYDPSTSSCSTPV

SEQ ID NO: 11924 - protein, 62 aa, Triticum aestivum
  unsure (1)..(62): unsure at all Xaa locations
GGSFGVGDTCEHHFESKADSCAFKTYPXQAGAIRKGGHIAIKALPCKGGEVSTCKTGKHGHA

SEQ ID NO: 11925 - protein, 342 aa, Triticum aestivum
  unsure (1)..(342): unsure at all Xaa locations
AASLPGAPALIEKPPTRPESAARAPPRLPPRAPQSAGGAPPRSPPRHTPEPGSRAAVRRRAEAGVRARAMDVDSVECLSLPDAAMDADDVGLALHPHGGILAAASRPAAYPKAGAGAGGIVAPGSSVHELLECPVCTNSMYPPIHQCQNGXYIKVKHAALCSFRPYSCPYAGSECSVTGDIPXYLVNHLRDDHKVDMHSGCTFNHRYVKSNPREVENATWMLTVFHCFGQYFCLHFEAFQLGMAPVYMAFLRFMGDENEARNYSYSLEVGANGRKMVWEGTPRSVRDSHRKVRDSHDGLLIQRNMALFFSGGDRKELKLRITGRQEKETQTPPQAACVTATG

SEQ ID NO: 11926 - protein, 371 aa, Agrobacterium tumefaciens str. C58
MECCRFSRTAAILDANRNWREETRMRGVVIHAAKDLRVEDVAGQPLAADEVRVAVAVGGICGSDLHYYNHGGFGTVRVREPMALGHEFAGTVVEVGSSVSHLVPGMRVAVNPSLPCGTCRYCAQGRQNQCLDMRFMGSAMRSPHVQGGFREVVTVHSTQPVQIADGLSMGEAAMAEPLAVCLHAARQAGSLLGKTVLITGAGPIGMLSLLVARLAGAAHIVVTDVADAPLDLARRIGADEAVNILRDADMLEKYRFEKGVFDVLFEASGNQAALLPALDLLRPGGIIVQLGLGGDFTIPMNLIVAKELQLRGTFRFHEEFAQAVNMMGRGLIDVKPLISATLPFDQAREAFDLAGDRAKSMKVQLAFSGAA

SEQ ID NO: 11927 - protein, 145 aa, Thermoanaerobacter tengcongensis MB4
MSLMRRGRDWWDWPFDINIRNLPSIFDINFPSLSGLFSRPRVDIVESETEIVATAELPGVDKKDIEINVYDNILEIKGQTSVDEEKEDKNYYIRERYYGSFARRIELPAEVDPERTTAKFENGILKITMPKLHPSKPKKRRIDIE

SEQ ID NO: 11928 - protein, 214 aa, Ustilago maydis
MAPAAICRKLVIVGDGACGKTSLLCVFAIGEFPQEYEPTIFENYVAEIRLDGKPVQLALWDTAGQEEYERLRPLSYSQAHVILIAFAIDTPDSLENVQVKWMEEVRQICGPSVPVLLVGCKKDLRENAIAKGKPVQGHYVKRQQAKLVAAQIGARSYHECSSLNNQGVDAVFEAATRAAMLVRNSGASSGGAISQSKTKEALHNDAGSCKCIVL

SEQ ID NO: 11929 - protein, 201 aa, Anaplasma phagocytophilum
RSEITFIDGNKGTLRYRGIDIENLIGAPNSFSSIVYLLLKGTLPSATEHEEFARILGAEYDVPEQVMNVIRSFPRDSHPMAILIASFSALAANYHASRIDPLTGAIIAIAKVPGIVASIYRHVANLDFIQADANLEYTHHFIRMMFGNMDEAHRDIMHKALDAIFIMHADHEQNASTATVRMSGSSGAGLFACLCAGVATL

SEQ ID NO: 11930 - protein, 503 aa, Pectobacterium carotovorum
MSNSFCVVYKGSDTDINNIQRDFDGKGEALSNGYLFIEQNGHYQKCEMERGTAYLIGSLYNRTFLIGLAGVWEGEAYLANDAELLALLFTRLGANALALAEGDFCFFIDEPNGELTVITESRGFSPVHVVQGKKAWMTNSLKLVTAAEGEGALWFEEEALVCQSLMRADTYTPVKNAQRLKPGAVHVLTHDSEGYSFVESRTLTTPASNQLLALPREPLLALIDRYLNAPLEDLAPRFDTVGIPLSGGLDSSLVTALASRHFKKLNTYSIGTELSNEFEFSQQVADALGTHHQMKILSETEVINGIIESIYYNEIFDGLSAEIQSGLFNVYRQAQGQVSCMLTGYGSDLLFGGILKPGAQYDNPNQLLAEQVYRTRWTGEFATHGASCYGIDIRHPFWSHSLISLCHALHPDYKIFDNEVKNILREYADSLQLLPKDIVWRKKIGIHEGSSVNQAFANVLGSTVDNYQTKSRFTYRVYQAFLRGRLSITDVTPSQLKDLIKKD

SEQ ID NO: 11931 - protein, 193 aa, Ustilago maydis
MQTIKCVVVGDGAVGKTCLLISYTTNAFPGEYIPTVFDNYSANVMVDGKPVSLGLWDTAGQEDYDRLRPLSYPQTDVFLVCFSLVSPPSFENVRTKWWPEVSHHAPNIPTILVGTKLDLREDPETIAKLRDRRMQPITYAQGNQMARDIHATKYLECSALTQKGLKGVFDEAIRSVLAPAPVQSKKKNNCLIL

SEQ ID NO: 11932 - protein, 160 aa, Triticum aestivum
MAGMVFGLDDPMMTALQHLLDIPDGEAGGTAGGEKQGPTRAYVRDARAMAATPADVKELPGAYAFVVDMPGLGSGDIQVQVEDERVLVISGERRREEKEDAKYLRMERRMGKLMRKFVLPENADMEKISAACRDGVLTVTVEKLPPPEPKKPKTIQVQVA

SEQ ID NO: 11933 - protein, 301 aa, Picrophilus torridus DSM 9790
MIDPEIKEIIENAGPLNPADIKIDEFRALMDNLAIEMSREKIKVREVTDIKINNIKSRLYNDSDSDGIIIYMHGGGFVFGSIESYDNICRYIAKCSGLKVLSVDYRLAPENKFPAALDDSFEAFKYVYDHYSDLRIKMDRICLAGDSAGGNLAASLSLKIYDELGVKPGLDVLFYPSLAPDTFSRSFSEYNDGPVLTGDLIQWFGSQYYKNFYDVLNPYFSPMLGDLSKMPESIVVTAEYDPLRDQGESYLKMLRKANVRATGIRSLMMVHGFATDFEYVSAARNILFMVYSLAGNIINKL

SEQ ID NO: 11934 - protein, 201 aa, Anaplasma sp. KhabIx
RSEITFIDGNKGILRYRGIDIENLIGAPNGFSSIIYLLLKGTLPSETEHEEFARILGTEYDVPEQVMNVIRSFPKDSHPMALLIACFSVLAAQYHASHIDSLTSALIAVAKVPGIVASIYRHATNLEFIQADANLEYTHNFIKMMFGDTNEEHRDIIHKALDAIFIMHADHEQNASTSTVRMSGSSGAGLFACLCAGVATL

SEQ ID NO: 11935 - protein, 478 aa, Gossypium hirsutum
MDSTSKSNAATSSKKDANNGQTLLLGRYEVGKLLGHGTFAKVYHARNVKSGDNVAIKVIDKEKILKSGLIAHIKREISILRRVRHPNIVQLFEVMATKSKIYFVMEYVRGGELFNKVAKGRLKEDVARKYFQQLISAVHFCHARGVYHRDLKPENLLLDENGDLKVSDFGLSAVSDQIRQDGLFHTFCGTPAFVAPEVLARKGYDAAKVDIWSCGVILFVLMAGYLPFQDQNIMAMYKKIYKGEFRCPRWFSPELIRLLTKLLDTNPETRITIPEIMEKRWFKKGFKHIKFYIEDDKLCSVEDDDNDVGSCSDQSSMSESETELETRKRVGTLPRPASLNAFDLISFSPGFNLSGLFEEGEEGSRFVSGAPVSTIISKLEEIAKVVSFTVRKKDCRVSLEGSREGAKGPLSIAAEIFELTPSLVVVEVKKKGGERGEYEDFCNRELKPGLKELMVEESQSSAAASLATSSSYLPSDTE

SEQ ID NO: 11936 - protein, 323 aa, Heterocapsa triquetra
MAPAKTSSAAMLGLGAAGWLSSGSLFVSPTPPRAAELSRYAPQATAAPAAGASQGFAPGVRCSILGVAAVTVAAGARRVARRATQDELKKQVGYKAVDDYVKSGTVIGLGTGSTAAFAVERVGQLLKSGELKDIIAIPTSIRTKEQAESLGIPLATLDTHSDLDVAIDGADEVDPNLNLVKGGGGALFREKIVEMCAKKFIVIVDESKMCGGLGPGFPIPVEIVPFCHEHTMREIAKLPALAGCKPVLRLGDVANNKPDGDKPAVTDNSNYIVDLVFETPIKDAVAAGEQLKNTVGVVDHGLFTGMTTACIIAGSDGISVKEA

SEQ ID NO: 11937 - protein, 233 aa, Triticum aestivum
WLGNRRRIIVMNREDMVSADDRNAWATYFSSQGIKVIYSNGQLGMGTMKLGRMAKSAASTVNTRRREKGLLPRPVRAGIVGYPNVGKSSLINRLLKRRMCPAAPRPGVTRELKWVRFGKDLELLDSPGILPMRISDQAAALKLAICDDIGERSYDFADVAAILVQILLRHPAVGSEAFRKRYKIDVDSDCGKLFVTKLSVHLFNGDTTQAAFRILSDFRKGRFGWVALERPPT

SEQ ID NO: 11938 - protein, 255 aa, Glycine max
  unsure (1)..(255): unsure at all Xaa locations
MRAMEDHFTLLSLDDGSLYVDVSGGALWEDVLKRCVSEFRLAPRSWTDYLGLTVGGTLSNAGVSGQAFRYGPQTANVTELEVVSGKGETLVCSESQNSELFFATLGGLGQFGIITRARVPVQQAPDMVRWIRVVYTEFGDFTRDAEWLVTLREGDGFDYVEGFVFVNSDDPCNGWTTVPVGPNQYFDPVRIPSTAGPXLYCLELALHYRNQDHPSAVDMEVDRLLGRLRFXEGLKFSVDVTYXEFLLRVKRVEGD

SEQ ID NO: 11939 - protein, 490 aa, Burkholderia cepacia R1808
MPLTLSRTELVRTANLVDGSWRAALDGRCFDVTNPATLDTIAYAPDSGAADARAATDAAARALPAWRATPARERAAILRAWHAAIVAHTDDLAKLMSLEQGKPLAEARGEVAYGASYVLWFAEEATRTYGDLIPQQQRGKQLSAVKVPIGVVAAITPWNFPLAMIARKIAPALAAGCTVVAKPAEDTPLTALALGFLAMEAGVPPGVLNLIAASRERGIDAVADWLADARVRKITFTGSTAVGKLLARESAATLKKLSLELGGNAPFIVFDDAQLDAAVDGLMAAKFRNGGQTCVSPNRVYVQAGVYDAFAAKLAARVAALKVAPATDPAAQIGPMINARAVDKIARHVGDALERGARVLTGGRRLSQLGPNYYAPTVLADATADMQLSCEETFGPVAALFRFDTEEQAVDAANDTPFGLAAYFYTQDVRRIARVSARLETGIVGINEGALASEAAPFGGVKESGYGREGSKYGLDDYLSIKYLCQGGLD

SEQ ID NO: 11940 - protein, 352 aa, Rhodococcus sp. TK6
MRVFAVQPDDTAIHDLEVPTPSPEGRQVLLKVVRAGVCHTDTHLRAGGYDLGSRGMMSMKARGIEYPMVLGHEVVGVVEKVGDSVESVRVGDVRLIYPWIGCGECRQCREGHDNRCAAGKNLGVARHGGYAEYILVPDEKYLVDIDGLDPSWAATLACSGLTAYSAVDKVLPLEPDEPVVVFGAGGLGLTAIAILRSRGHRNICAVDVAERNLALAQDMGASSTVLSGPGSGADDIRRAAGGPASAVIDFVNNGVTATAAFEVLAKAGIMVQVGLFGGEVTLPTALLALRMIRIEGSFVGTPAQMQELVRLAQRGALPHIPLVERPLSAAAVSQALDDLTAGGVAGRIVLTA

SEQ ID NO: 11941 - protein, 362 aa, Bacillus sp. KSM-K16
MNDSIPKKMKAVVAYGPKDYRLEEVDVPVIEHDKEIIVKVEATGICAGDIKAFDGAPSFWGDDTQPAYIKAPMIPGHEFIGHVVAKGDGVGDFEIGDRIISEQIVPCWECRFCNRGQYWMCEKHDLYGFQNNVNGSMAEYMKFTKEAINYKVPADLPIEQAILIEPYACSMHAVQRARIELGDIVVLSGAGTLGLGMIGAVKKSGAKTLVVLDLKDERLALAQQFGADVVLNPAKDNVVEKVKDMTDGYGCDVYIEATGHPASVEQGLSMIRKLGRFVEFSVFKDPVTVDWSIISDRKELDVLGSHLGPYCYPLVIEGIANGDLPTEGVVTHELPLERFAEGFELMKNGSNSLKIILKPQQA

SEQ ID NO: 11942 - protein, 121 aa, Glycine max
EKQLVSVTKDTRKGGPLEGAHVHIVHLSDSSASLDLIKEAKSHGDSISVETCPHYLAFTSEEIPNGDTRFKCSPPIRDAYNKDKLWEAVLVRFLSKNTNYSLSFMIIYDLICFLHVLLFIS

SEQ ID NO: 11943 - protein, 460 aa, Rhodococcus sp. TK6
MGVYTTTDPATGEEVAQYPEISDAELDELIGRSAAAYRSWRTTPLEQRRAVLARAAEIHREQADELAALLTLEMGKPITQAKGEVALVASIYQYYADHAEEFMADEPLDIAGSGTAVVRTEAIGPLVGVMPRNYPFYQVARFAAPNIALGNTIILKHARNCPQSALALERVLTEAGLPDGVYLNAFISSAQVAAAIADPRIQGVSLTGSEKAGSAVGEVAGRHMKKCVLELGGSDPFIVLGDADVDAAASAAVVGRLGNGGQACTASKRFLVEEPVYDEFVRKFLDGMTGWQPSDPASPETKLGPLSSRSAVDELDELVQDAVSHGAEVLTGGDRPDEKGAYYPPTVLVGVTPEMRAYHEELFGPVVVVHRVGSLDEAIEAANDSPFGLSSSVFTSDPDKADRVAEELETGMVWINSTSKSSPDLPFGGVKRSGVGRELARFGFNEFANKKLVRNPGGKK

SEQ ID NO: 11944 - protein, 397 aa, Oryza sativa (japonica cultivar-group)
MLTCIACSKQLAGGAPPLREQSDDADDAAVARGAGECATPSTRQAIKALTAQIKDMALKASGAYRHCKPCAGSSSSSPAAGARRHHPYHAYADSGSDRFHYAYRRAGSGGDATPSVSARTDFLAGDEEEEEEEEEEEGTTADGSEDDEAKEWVAQVEPGVLITFLSLPEGGNDLKRIRFSREIFNKWQAQRWWAENYEKVMELYNVQRFNQQTPLPTTPKSEDESLKEDIPATPPLNSERLPHTLHRSLTGGRTTGYGQPDSLGHQHNLGNGHRQQHHHCYTGHQCYGSVGLASTPKLSSISGAKTETSSMDASMRSSSSPEEVDRSRELSVSVSNASDQEREWVEEDEPGVYITIRALPGGIRELRRVRFSREKFSEMHARLWWEENRARIHDQYL

SEQ ID NO: 11945 - protein, 180 aa, Chloroflexus aurantiacus
MAKQRLRVIPLGGAGEVGRNMWVVEYGDDIVILDCGVMFPDADMLGVDLVLPDITYLREKTDHIRGILLTHGHEDHIGAVPHLIADLGFPPIYGTKLTLGLLGNRLREHRLHDKVTTVQSMNGCRSRWSVHVEASNCQSFPMRRLAYHLRLRLRARGAITRCGATSGSCDGIHPGRTMSC

SEQ ID NO: 11946 - protein, 299 aa, Glycine max
  unsure (1)..(299): unsure at all Xaa locations
MVYVKSQKSKAYFKRYQVKFKRRREGKTDYRARIRLINQDKNKYNTPKYRFVVRFSNKDIVAQIISASIAGDIVLAAAYAHELPRYGLEVGLTNYAAAYCTGLLLARRVLKTLEMDEEYEGNVEATGEDYSVEPAESRRPFRALLDVGLIRTTTGNRVFGAXLKGALDGGLDIPHSDKRFAGFDKEKKELDAEVHRKYVFGGHVAAYMKILAEDEPEKYQSHFSEYIKRGIEADGIEALYKKVHAAIRADPSLKKSEKQPPKEHKRYNLKKLTYEERKAKLIARVAAINSAADNDEDDE

SEQ ID NO: 11947 - protein, 451 aa, Triticum aestivum
  unsure (1)..(451): unsure at all Xaa locations
MAASEGAMRMGKYEMGRTLGEGHFGMGRXSGRGTSGRAFVAKIPDPERVLAMKIDEQIKTEIATLKLLKHPNVVRLYEVAASKTKIYMVLEYVNGGELFEKIALKGKLSEKEGRKLFQQLMDAVSYCHERGVYHRDLKPENVLVDAKGNIKVSDFGLSALPQHQRRTRXLHTTCGSPNYIAPEVLLNKGYDGSMSDVWSCGVILYVMLTGNLPFDDENMVVLYQKILKGDYRIPKWLSPGAQDILRKLLDPNPITRLGMDGLREHDWFNQSYTPAVPFDDDDDNYVGDDNSHMTKHNGIPDNPAINQMNAFQLIGMSSCLDLSGFFEKEDVSERKTRFASNYPPTYLFEKIESNVINMGFQVQKNNGKLKVIQERKGPTNPRGHGSLLISAEVFEINESLYVVELKRSCGDCSLYRQLCATLSDDLGICKSQQLLKNDSIRQELYRFNSSF

SEQ ID NO: 11948 - protein, 493 aa, Agrobacterium tumefaciens str. C58
MRSKVMRRFQCYIDGRFEDGEASFSSLDPATGQPWAEMPESREADIGRVVEAAHRALYEDTVWSKLTATQRGKLLYRLADLVAENAKTLAELETRDTGKIIRETSAQIAYVADYYRYYAGLADKIEGAYLPIDKPDMDVWLRREPVGVVAAIVPWNSQLFLAAVKIGPALAAGCTIVVKASEDGPAPLLEFARLVHEAGFPAGVVNVVTGFGASCGNALTTHPKVAHIAFTGGPETARHIVRNSAENLASTSLELGGKSPILVFADADLESAANAQVAGIFAATGQSCVAGSRLIIEKSVKDRFLQILAAKAEAIRIGSPLDMATEVGPLATERQRKHIVSLVSASVDAGAKVVTGGEPVEGEGYFYRPTILDCDGIRSPSLEKEFFGPVLSVVSFETEAEAISLANDTVYGLASGVFTQNLTRAHRLMKAIRAGIVWVNTYRAVSPIAPFGGFGLSGDGREGGLAAALDYTRTKTIWLRTSDDPIPDPFVMR

SEQ ID NO: 11949 - protein, 490 aa, Triticum aestivum
MDPNSFKTGGLLLPTIERRCASPPSVIVIGGGISGIAAARVLSNSSFEVTVLESRDRIGGRVHTDYSFGCPIDMGASWLHGVSNENSLAPLISHLGLRLYHTSGDNSVLYDHDLESCSLFDKNGLAVPMETAAKVGVIFEKILKETVKLRDEQEHDMPLEQAISMVLERHPDLKLEGLDDRILQWCVCRLEAWFAADADEISLKNWDQEHVLTGGHGLMVDGYFPVIQALAQGLDIRLNQRVKKIARQQKGVTVTIEDGTQYSADACIITVPLGVLKANIIKFEPELPSWKSSAIADLGVGIENKVAMHFDKAFWPNVQVLGMVGPTPKTCGYFLNLHKATGHPVLVFMAAGRFAQDVEKLSDKEAVELVMCHLRKMIPDATEPSQYLVSRWGSDPNSLGSYSCDLVGKPSDVCERFSAPVESVLYFAGEAASAEHSGAVHGAYSSGMDAAEECRRRLLMRKGVPDLVQVGAAACEEMADVVAPLQICRT

SEQ ID NO: 11950 - protein, 186 aa, Brassica napus
  unsure (1)..(186): unsure at all Xaa locations
LDPRVRTGAKLSRSEHSMGASSEPKSIYDFTVKDAKGNDVDXSTYKGKVLLIVNVASQCGLTSTHASELAQLYQKYKDHGFEILAFPCNQFGNQEPGSNEEIVQFACTRFKAEYPIFDKVDVNGDSAAPIYKFLKSSKGGLFGDGIKWNFAKFLVDKDGNVVDRYAPTTSPLSIEKDLKKLLGVTA

SEQ ID NO: 11951 - protein, 388 aa, Photorhabdus luminescens subsp. laumondii TTO1
MSEQNTMTELTTFKPKKSVALSGVSAGNTALCTVGKTGNDLHYRGYDILDLATQCEFEEVAYLLVHEKLPSRAELAAYKAKLTALRGLPGSVKAALETLPAAAHPMDVMRTGVSVLGCTLPEKDDHNLAGARDIADRLLASLSSILLYWYHYSHNGRRIEVETDDVSIGGHFLHLLHGKKTCESWEKAMHTSLILYAEHEFNASTFTSRVIAGTGTDIYSAIIGAIGALRGPKHGGANEVSFEIQQRYENPDEAERDILARLARKEVIIGFGHPVYTISDPRHKVIKDVALQLSKEAGTTKMFNIADRLEAVMWANKKMFPNLDWFSAVSYHMMGVPTAMFTPLFVIARTAGWAAHIIEQRIDNKIIRPSADYTGPENRVFTPIGKRG

SEQ ID NO: 11952 - protein, 342 aa, Burkholderia cepacia R1808
MKALAKLERAPGLTLTRVKRPEVGHNDVLIKIRRTAICGTDIHIWKWDDWAQKTIPVPMHVGHEYVGEIVEMGQEVRGFAIGDRVSGEGHITCGFCRNCRAGRRHLCRNTVGVGVNREGAFAEYLAIPAFNAFKIPPEISDDLASIFDPFGNATHTALSFNLVGEDVLITGAGPIGIMAVAIAKHVGARNVVITDINDYRLELARKMGATRAVNVARESLRDVMAELRMTEGFDVGLEMSGVPSAFTSLLEAMNHGGKVALLGIPPAQTAIDWNQVIFKGLEIKGIYGREMFETWYKMVAMLQSGLDLSPIVTHRFAVDDYEKGFAAMLSGESGKVILDWTA

SEQ ID NO: 11953 - protein, 201 aa, Glycine max
  unsure (1)..(201): unsure at all Xaa locations
GPRIGRFDRSGRSVALRGXHSASLVVLGTXXLWFGWYGFNPGSFLTIAKGYESGGYYGQWSAIGRTAVTTTLAGSTAALTTLFSKRLLAGHWNVIDVCNGLLGGFVACHSDXTLVEQWTXVCEWVSDGVAFVLGLISQPRRYSTMICWSAAQFHGGCGAXGIYVTGLFAKKEYVEEIYGGGRPFGALMGGGGRLLAAQVIQ

SEQ ID NO: 11954 - protein, 484 aa, Agrobacterium tumefaciens str. C58
MHLNDPTLFCEKVPVAGRWIGCDDRETATIRNPATGKIVGQVPELGATETQAAITAAVIAQKAWARRTAGERAAILKAWHRLVMENRDDLGMILTLEQGKPLAEAKGEIAYGASFIEWFAEEARRINGETVPGHQADKRILVLRQPVGVVAAITPWNFPNAMITRKVGPALAAGCAVVLKPAPQTPFSAIALAILAERAGLPLELFSIVTGPAAEIGGVLTASPDIRLLTFTGSTRTGEHLYRQCAPTIKKLGLELGGNAPFIVFNDADLDAAVEGALIAKFRNNGQTCVCANRLYVQSGVYDAFAEKFARAVSGLKVGNGLEEGSILGPLIDGNAVAKVEAHIADALSKGAQIAAGGSRYALGGNFFEPTILRNVTADMQVAREETFGPLAPLFRFEDEEDVIAQANNTDFGLASYFYARDLSRVFRVAEALEYGMVGVNTGAISTAEAPFGGVKMSGLGREGSRHGIEEYTELKYVCIGNIL

SEQ ID NO: 11955 - protein, 517 aa, Glycine max
MAEVAPPKKENPNLLLGRFELGKLLGHGTFAKVHHARNIKTGEGVAIKIINKEKILKGGLVSHIKREISILRRVRHPNIVQLFEVMATKTKIYFVMEYVRGGELFNKVAKGRLKEEVARNYFQQLVSAVEFCHARGVFHRDLKPENLLLDEDGNLKVSDFGLSAVSDQIRQDGLFHTFCGTPAYVAPEVLSRKGYDGAKVDIWSCGVVLFVLMAGYLPFNDRNVMAMYKKIYKGEFRCPRWFSSELTRLLSRLLDTNPQTRISIPEVMENRWFKKGFKQIKFYVEDDRVCSFDEKLLLHHDDDLATSDSEVEIRRKNSNGSLPRPASLNAFDIISFSQGFDLSGLFEEKGDEARFVSSAPVSKIISKLEEVAQLVSFSVRKKDCRVSLEGCREGVKGPLTIAAEVFELTPSLVVVEVKKKGGDKAEYEKFCNSELRPALENLGMEESASSSSSCHQSTHTQSEFQQHRTLSDSALNRHSDNECLFERELGLADETSISQHGESKFECQQENMAMFTI

SEQ ID NO: 11956 - protein, 160 aa, Glycine max
  unsure (1)..(160): unsure at all Xaa locations
ASSMISSPAVTTVNRAGAGMVAPFSGLKSIAGFPTKKTNNDITSIATIRGKVQFLHVWPPLGKKKIDTLSYLPYLDDAQLPNELEYLLTNVWIPCLEFXMEHIFMYREHYTSPGYYNSRYCTMLKLPMVGCTDASRVIKELLQAKTAYPNGXFIRIIGFD

SEQ ID NO: 11957 - protein, 283 aa, Picrophilus torridus DSM 9790
MEFYLGKTGERISSIGIGTWQMKSNDQSIMAIRAGLDAGSNFVDTAEAYRNEAMVGRAIESREVFIATKVFPNHFKYDSLIRACENSLKRLNVKTIDLYQLHWPNRHVDIKETMKAMEHLVDTGMIRYIGVSNFNVNELKSAMSAMSKYEIVSNQVEYNPLVRYIEPEISEFCRKNSISIIAYSPLMHGHDIDPISKDESPFNIIANKRNATVRQVILAWILSKNFFAIPKSNVPEHVIENVKSMNINLSSEETSMIDHYVSRFNKKSLKERYGNIISFVSRF

SEQ ID NO: 11958 - protein, 449 aa, Xylella fastidiosa 9a5c
MNPTLIVNARLVNEGREFDSDLRIENGRIARIDTGLSAQSKDIVIDAAGRRLLPGMIDDQVHFREPGLTHKGDIASESAAAVAGGLTSFMDMPNTNPPTLDVAALQAKYDAASGRAWGNYGFYLGASNDNLAAIQALDPKTSPGIKVFMGASTGNMLVDNEATLEGIFRDAPTPIITHCEDTPTINATLAKYQSRYGDTLSAEQHPDIRSRQACLKSSQLAVSLAKKNGTRLHVLHISTADELRLFEAGPLVDAAGKRRKQITAETCIHFLHFDRMDYARLGNLIKCNPAIKEVSDREALIAALAKDVIDVLATDHAPHTWEEKQQPYAQAPSGLPLVQYALVAALELVHAGRLSVTEIVRKFAHAPAQLFDVTGRGFLREGYWADLVLVEDTPFTVKRQEILSKCGWSPFEGTTFRSRIASTWVNGHHVWDGNRLVGVPNGQRLEFDR

SEQ ID NO: 11959 - protein, 147 aa, Triticum aestivum
  unsure (1)..(147): unsure at all Xaa locations
MSDEEHHFESSDAGASKTYPQQAGNIRKGGHIVIKGRPCKVVEVSTSKTGKHGHAKCHFVAIDIFTAKKLEDIVPSSHNCDVPHVNRVDYQLIDISEDGFVSLLTDSGGTKDDLKLPTDDNLSALMKSGFEEGKDVVVSXVMSSMGE

SEQ ID NO: 11960 - protein, 359 aa, Capsicum annuum
MDSTNQNLTQTEDEAFLFAMQLASASVLPMVLKSALELDLLEIMAKAGPGAAISPSELAAQLPTKNPEAPVMLDRMLRLLATYSVLNCTLRTLPDGRVERLYSLAPVCKLLTKNADGVSVAPLLLMNQDKVLMESWYHLTDAVLDGGVPFNKAYGMTAFEYHGTDPRFNKVFNRGMSDHSTMTMKKILEDYKGFEGLNSIVDVGGGTGATVNMIVSKYPSIKGINFDLSHVIEDAPAYPGVEHVGRDMFVSVPKADAIFMKWICHDWSDEHCLKFLKNCYEALPANGKVLVAECILPETPDTSAATKNAVHVDIVMLAHNPGGKERTEKEFEALAKGAGFTGFRRACCAYQTWVMEFHK

SEQ ID NO: 11961 - protein, 336 aa, Rubrobacter xylanophilus DSM 9941
MARTVTLIPGDGIGPEVTGSAKEVIGALGVDIEWEIAEAGETVMEREGTPLPEYVLESIRRNKVALKGPLTTPVGTGFRSVNVALRKELDLYANIRPALSLPGLDLPYRDIDILLFRENTEDLYAGVEHMVGKHAAESIKIITREGTERICRMAFEYSRDQGRRHVTVVHKANIMKYTDGLFREVFYEVARDYEDDFEEIDERIVDNMAMQLVMKPNLYDVLVCPNLYGDILSDLCAGLTGGLGVAPGANIGEDIALFEPVHGSAPKYAGQNRANPLATLLSAKNMLYYLGYGEAADRMQGAINAALKNPETRTKDLGGSAGTREFTRAVISNLTG

SEQ ID NO: 11962 - protein, 179 aa, Zea mays
  unsure (1)..(179): unsure at all Xaa locations
MATSFQGTTTTCTACDKTVYLVDKLTADNRIYHKACFRCHHCXGTLKLANYNSFEGVLYCRPHFDQLFKRTGSLDKSFEXATKVSSAFAGTREKCVGCSKTVYPTERVTVNNTMYHKSCFKCCHGGCTISPSNYIAHEGKLYCKHHHIQLIKEKGNFSQLENDHEKTSQAGSLEEDEQE

SEQ ID NO: 11963 - protein, 466 aa, Burkholderia cepacia R1808
MNQAALIEADRQHLIHPVVNYRAHEARGVTVLESADGVFLRDGDGHTLLDAFSGLWCVNVGYGRESIVKAAAEQMAKLPYATGYFHFGSQPAIELAERLAALAPPSLNRVYFTLGGSDAVDSAVRFITHYFNATGRPSKKQMIALERGYHGSSSIGAGLTALPAFHRHFDLPRADQHHIPSPYPYRHPLGDDPQALIAASVAALEAKVAALGADNVAAFFCEPIQGSGGVIVPPAGWLKAMRDACRRLGILFVADEVITGFGRTGPLFACETESVEPDLMTVAKGLTAGYAPMGAVLMSDEIYEGLAGSRTESAVVGHGHTYSAHPVSAAIGLEVLKLYHEGGLLANGRAQAPRFAAGLDALRAHPLVGDARSAGLLGALELVADKARKTRFDPALNVPDKIAAAAYANGVVFRAFGDGVLGFAPALSFTAGEFDLMFERVRKTLDDVLADPGVQRALDAAHAQPA

SEQ ID NO: 11964 - protein, 534 aa, Zea mays
MAVVYYLLLAGLIACSHALAAGTPALGDDRGRPWPASLAALALDGKLRTDSNATAAASTDFGNITSALPAAVLYPSSTGDLVALLSAANSTPGWPYTIAFRGRGHSLMGQAFAPGGVVVNMASLGDAAAPPRINVSADGRYVDAGGEQVWIDVLRASLARGVAPRSWNDYLYLTVGGTLSNAGISGQAFRHGPQISNVLEMDVITGHGEMVTCSKQLNADLFDAVLGGLGQFGVITRARIAVEPAPARARWVRFVYTDFAAFSADQERLTAPRPGGGGASFGPMSYVEGSVFVNQSLATDLANTGFFTDADVARIVALAGERNATTVYSIEATLNYDNATAAAAAVDQELASVLGTLSYVEGFAFQRDVAYAAFLDRVHGEEVALNKLGLWRVPHPWLNMFVPRSRIADFDRGVFKGILQGTDIVGPLIVYPLNKSMWDDGMSAATPSEDVFYAVSLLFSSVAPNDLARLQEQNRRILRFCDLAGIQYKTYLARHTDRSDWVRHFGAAKWNRFVEMKNKYDPKRLLSPGQDIFN

SEQ ID NO: 11965 - protein, 256 aa, Selaginella remotifolia
ETWLVTTTSSSNPEVGLATGLAATGGAQDLLNPPLNKQKEPPVGRGKIEIKRIENATSRQVTFSKRRGGLLKKAHELSVLCDAQVALIIFSSTGKLFEYASTSMKEILDRYGKYPESVQGGNMASHHEASDFISHEIRRLKQQLQRSQQSRRHLLGDDLSHLPIKDLQNLEQQLEVGLSRVRSRKDQVLMDQVDELRRRELTLHKDNEMLRRRLSDVQGMAESGRSTLIVNPWRQGNLLQTWQMYPCHFLDTKAAA

SEQ ID NO: 11966 - protein, 488 aa, Ralstonia eutropha JMP134
MIQTQLYIDGRWQSPLEGSTRDILSPADESVIAQAAEGTRADARIAIAAARRAFDGPWRQTTIRDRARLLNRIAALIDRDAEELARFESLNTGKTLTESRTDMGDIAATFRYFAGLVASESGAVNEAPHHVISRTLREPVGVCGLITPWNYPLLQAAWKIAPALGAGNTVIIKPSNLTPLTTHHFTKLIAELDLPAGVFNLVTGGAEVGAELAESRDVDLVSFTGGAFAGESIMKAATGNFKRIGLELGGKNPNIVFADADLDVAVDYALNAAFFHAGQVCSAGSRLMIEDSIYDAFVAKLAERLPRIAIGNGFHAETQMGPVQSAQQHEKILRMVQAGVAEGARLVYGGKRPEGDVYRKGYWLQPTLLADVTADMNIAKDEIFGPVVTAERFRSEDDALRAANDTPYGLAAAVWTRDLDKANRMSRALRFGTVWVNDYHPYFPEAPWGGYKASGIGRELARIGLDEYTELKHSYINLAPKAMGWFGA

SEQ ID NO: 11967 - protein, 418 aa, Burkholderia cepacia R1808
MPYQHIKVPEGGDKITVNKDFSLNVSDQPIIPYIEGDGTGFDITPVMIKVVDAAVAHTYKGKRKIHWMEIFAGEKATKVYGPDVWLPDETLQVLKEYVVSIKGPLTTPVGGGIRSLNVALRQELDLYVCLRPIQYFKGVPSPVREPQKIDMVIFRENSEDIYAGIEWAAGSEQAKKVIKFLQDEMGVKKIRFPETSGIGIKPVSTEGTERLVRKAIQYAIDNDRKSVTLVHKGNIMKFTEGLFRDAGYALAQKEFGGELIDGGPWMRVKNPKTGAEIVIKDSIADAFLQQILLRPAEYDVIATLNLNGDYVSDALAAQVGGIGIAPGANLSDSVAMFEATHGTAPKYAGKDYVNPGSEILSAEMMLRHLGWTEAADTIIAAMEKSILQKRVTYDFARLMEGATQVSCSGFGDVLIENM

SEQ ID NO: 11968 - protein, 402 aa, Medicago sativa
MDEAGSSSSLPPFLAKTYEMVDDRSSDPIVSWSASNKSFVVWNPPEFARVLLSEILKHNNFSSFIRQLNTYGFRKVDPEQWEFANDDFIRGQPHLMKNIHRRKPVHSHSLHNLQAQASLTESERQSMIDEIEKLKQDREQLLVETKRYQHDWERHEIQMHCSKDQLEKLEHKQQKMLSSVSEALQKPMIAVNLLPLAEAMERKRRLPARSVCFNNEASVEDAMETSVALPRENSEDNFYFDVKHREIGSTSRHPWHFGKTLAHEVGDNFVHTHSNMDLDESTCCADRLSISCQQLDGEVRPKSPEIDMNVEPAAAALEAVAVKEQPARITTAATGVNDVFWEQFLTEDPGASEAQEVQSERKDNSSRKNEGKPSDHGRFWWNMRKSNNHPEQMGHVSQVEKI

SEQ ID NO: 11969 - protein, 480 aa, Burkholderia cepacia R18194
MLPAAHIAGQPVRTHADAPGAPIFDASTGAAIGWQEFATAAHVDAAVRAARDAFAGWRDTPPAERGRILAKIAERVEASRDRLAALQMQVSGKPPFEAEADVGDVAATFAYYAKLCEDPALFAAEPVALPSDAVTAERFYDSVGVAALVMPWNFPMVTTAWKLAPALAAGCAVVLKPSELTSPTEHALLDIVAEAGVPAGVVNVVNGGAEVGAALTAHPLIDKISFTGSTAAGRKVMQAAAVDMKRVTLELGGKSSLIVRDDADLDVAVSLAVAGAFTNAGQMCSATARILVHDSVYRSFMAAFETAVRALVVAPPAAEQVAMGPLISAAQRTRVEAMLQQGIDAGARVAFSGRVADAGGDGFFMAPVVIAEPAADNPLWTDEVFGPVACVKSFRTDDEAIALANDTRYGLVATVVTRDAAIAKQFQQRVRAGLVWINAPQLIYPHVCWGGFGLSGIGRELGVAGLRSYQELRHAMHAID

SEQ ID NO: 11970 - protein, 188 aa, Brassica napus
  unsure (1)..(188): unsure at all Xaa locations
STQRVRCERICGVLLIEELGLENEAEKPSNALLTRAWSPGWSXADKILTEFIEKQLIDYAKNSKKVVGNSTYLLSPYLHFGEISVRRVFQCARMKQIIWARDKNGQGVESAVLFLRGIGLRDYSRYICFNFPFTHEQSLLSHLRFFPWDADVEKXKAWRXGRTGYSEVDAGMRXELWATGLMHNRIRV

SEQ ID NO: 11971 - protein, 232 aa, Guillardia theta
MIQYALKSNASYHSRFKLKKRRRRIGKTDYKKRMKLIRQDKKKFENKKKRIIIRFSKRNLSLQMVNSNVDGDFILLSSYLKNLSKLEYKNLTNNYPFSYLLGYYFGKDLIEKVKQSETYNKKNYSSKITAIIDIGLKRATIGNKSFASMKGSVDSGINIPHNYNKIFKVKNNEIDSKELFNERSKGIHIIKYIDLLKNEDEEKLKKQFSNIFLSRDSLSTIKKNYLIKNKNK

SEQ ID NO: 11972 - protein, 375 aa, Rubrobacter xylanophilus DSM 9941
MSGGAAFAPGLEGVVATRTRLSMVDGAAGRLVIAGFPVEELAGRASFEETLYLLWNGVLPDAGRLEGLRGDLAARRALPEAAGEVLEAAVAGGAAPIDALRMAAGTLAPSGNDRDDALTSVAAFPTIVAACWRLSQGREPVEPDPGLSHAANYLYMLSGEVPGEERVRALETYLNTVSDHGMNASTFAARVISSTGSDLISAVVGAIGALKGPLHGGAPGPALDVVFEIGEPGRAEGVLRERLDRGERLMGFGHRVYKVRDPRADVLAGAAERLYASDADEELYRLALEVERTALRLLEEYKPGRNLDTNVEFYTALLLHGLGLPTGLFTPTFAVGRVAGWTAHCLEQRETGRLIRPQSEYVGPEARKWVPLEER

SEQ ID NO: 11973 - protein, 300 aa, Triticum aestivum
  unsure (1)..(300): unsure at all Xaa locations
MAMSDLAAAVISKPHGAVVGVSPAKIREVWADNLEAEFAXIRDVVDDYPYIAMDTEFPGIVCRPLGASPXSFRSNDEYNYATLKANVDMLSLIQLGLTLSDENGALPAXATGGRPCAWQFNFRGFDPRSDPANADSIDLLRNSGIDFDRFTTEGADTGHFAELLMSSGVLLNAELQWVTFHSGYDFGYLLKLLTGRNLPDTMPGFFDLIRIYFPVLYDIKHLMKYCGSLHGGLSKLGELLGVQRVGICHQAGSDSLLTLQCFQKLKEAYFRGSTENYAGVLYGLISDGGENRPPAALLIE

SEQ ID NO: 11974 - protein, 302 aa, Zea mays
MAGMSLQHPWAFAFGLLGNVISFMTFLAPIPTFYRIYKSKSTEGFQSVPYVVALFSAMLWIFYALIKSNETFLITINAAGCVIETIYVVMYFVYAPKKAKLFTAKIMVLLNGGVFGVILLLTLLLFKGSKRVVLLGWICVGFSVSVFVAPLSIMRRVIQTKSVEYMPFSLSLSLTLSAVVWFLYGLLIKDKYVALPNVLGFIFGVVQMVLYVFYMNKTPVAATAVGKDAGKLPSAADEHVLVNIAKLNPALPERTSGMHPVTQMAAVPARSCAAEAIAPAMLPNRDVVDVFVSRHSPAVHVV

SEQ ID NO: 11975 - protein, 112 aa, Bartonella sp. af116nev
ANEACLKMLQEIGFVKRIPEFIARAKDKNDPFRLMGFGHRVYKNYDPRAKIMQKTCHEVLKELNIQDDPLLDIAIELEKIALNDEYFVEKKLYPNVDFYSGITLKALGFPTE

SEQ ID NO: 11976 - protein, 137 aa, Phaseolus vulgaris
MAQKAQKNDTDFKVPEPITPCATATAAAATSISEPSRFFDAATPATSSRSPKRSLPLEDAANADRTVASEPKRAVNRCSGCRRRVGLTGFRCRCGDLFCAEHRYTDRHDCSYDYKTVGREAIARENPVVKAAKIVKV

SEQ ID NO: 11977 - protein, 112 aa, Bartonella sp. af107nev
ANEACLKMLQEIGSVERIPEFITRAKDKNDPFRLMGFGHRVYKNYDPRAKIMQKTCHEVLKELNIQDDPLLDIAIELEKIALNDEYFVEKKLYPNVDFYSGITLKALGFPTE

SEQ ID NO: 11978 - protein, 526 aa, Triticum aestivum
  unsure (1)..(526): unsure at all Xaa locations
MAMAMRRAAALGARHILAASASASSRVASRRHMGSVDAGAAMDKIRAAGLLRTRGLIGGQWVDAYDGKTTEVQNPATGEVLANVACMGNRETADAITSANTTFYTWSKLTASERSKALRKWHDLLMSHKEELALLMTLEQGKPMKEALGEVNYGASFIEFFAEEAKRVYGDIIPPTLADRRLLVLKQPIGVVGAITPWNFPLAMITRKVGPALACGCTVVVKPSEFTPLTALAAADLALQAGIPAGALNVVMGNAPEIGGELMQSTQVRKITFTGSTAVGKKLMAGSANTVKKVSLELGGNAPCIVFDDADIDVAVKGSLAAKFRNSGQTCVCANRILVQEGIYEXFASAFVKAVQSLQVGNGLEESTSQGPLINEAAVQKVEKFVGDATSKGANIMLGGKRHSLGMSFYEPTVVGNVSNDMLLFSEEVFGPVAPLIPFKTEEEAIHLANDTNAGLAAYMFTKNIARSWRVSEALEYGLVGVNEGLISTEVAPFGGVKQSGLGREGSKYGMDDYLEIKYVCMGNLG

SEQ ID NO: 11979 - protein, 262 aa, Hordeum vulgare
MSTAEATREENVYMAKLAEQAERYEEMVEFMEKVAKTADVGELTVEERNLLSVAYKNVIGARRASWRIISSIEQKEESRGNEAYVASIKEYRTRIETELSKICDGILKLLDSHLVPSATAAESKVFYLKMKGDYHRYLAEFKAGAERKEAAENTLVAYKSAQDIALADLPTTHPIRLGLALNFSVFYYEILNSPDRACNLAKQAFDEAIAELDSLGEESYKDSTLIMQLLRDNLTLWTSDNAEEGGDEIKEAASKPEGEGHS

SEQ ID NO: 11980 - protein, 514 aa, Zea mays
  unsure (1)..(514): unsure at all Xaa locations
MDGRRTILMGRYEIGKQLGQGTFAKVFYARNLTTGLAVAIKMINKDKVMKVGLMEQIKREISIMRLVKHPNILQLYEVMASKSKIYFVLEYAKGGELFNKIAKGGKLSEDVARKYFQQLVSAVDFCHSRGVYHRDLKPENLLLDENENLKVSDFGLSALAESKRQDGLLHTTCGTPAYVAPEVLSRKGYDGAKADVWSCGVILFVLVAGYLPFHDTNLIEMYRKISRAEFRCPRFFSTELKDLLHKILVPDPSTRISISRIKRSAWYRKPVEAHAKKNEAETSENTCTGEGTTSVSTECSTSEGNQGPLSLPNLNAFDIICLSTGFNLSGFFEDKYGRREERFTTRQPVTTVFTKLKELAKRLKLKVNKKENGTLKLAAPKEGKKGMLELDAEIFEVAPSLLLVELXKKTNGDTLEYQKLVKEEIRPALKDIVWVWQDDQHQCSQLPESLLSPPETQDELRLSLPQQEGQDFLEAPLPSLSLDQLKSPTAPEQAEQLPQPEQLQTPIAPEEQIN

SEQ ID NO: 11981 - protein, 124 aa, Glycine max
  unsure (1)..(124): unsure at all Xaa locations
MEPMDIVGKAKEDASLPKATMTKIIKEMLPPDVRVARDAQDLLIECCVXLGFGEYIEEVYAAYEQHKLESMQDSLKGAKWSNRAEMTEEEALAEQQRMFAEARARMNGGAIQSKEPEADQSLES

SEQ ID NO: 11982 - protein, 86 aa, Zea mays
KARPFCRRCAPGLNWPGRASGAVTLKKLECSKQAIALDTLAWDNIILPPLGVFFKFGCGVEFWICLILTFFGYLPGIIYAVWAITK

SEQ ID NO: 11983 - protein, 90 aa, Triticum aestivum
MASFARGAASLTRIGLSTSKTPLQLIHRRGLADHHGPPKVAYWKDPMSPSKWKEEHFVIVSLTGWGLLIYGGYKLATGGKGKKEEELAKA

SEQ ID NO: 11984 - protein, 423 aa, Bacillus sp. KSM-K16
MLEEKQLVESWEHEERWKGIIRPYEAADVMRLRGTLEIEYTIARRGAEKLWKLLHTEDFVPALGALTGNQAMQQVKAGLKAIYLSGWQVAADANLAGSMYPDQSLYPANSVPEVVKKINRTLQRADQISHMEGKEDIDWYAPIVADAEAGFGGQLNVFELMKSMIEAGAAGVHFEDQLSSEKKCGHLGGKVLLPTQTAVRNLIAARLAADVMGVPTILIARTDANAADLITSDVDSYDAPFLTGERTAEGFFKTKSGLDQAIARGLAYAPYADLIWCETSEPNIEEARRFAQAIHEKFPGKLLAYNCSPSFNWKAKLDDHTILNFQKQLGEMGYKFQFVTLAGFHALNHGMFELSRQYKDRGMAAYSDLQQAEFASEAHGYTATRHQREVGTSYFDEVAQVVTGGTSSTTALKGSTEAEQFQS

SEQ ID NO: 11985 - protein, 160 aa, Bacillus cereus ATCC 14579
MTVYDFSAKTITGEEKSLKDYKGKALLIVNVASKCGFTPQYKGLQEVYDKYKDQGLEILGFPCNQFGGQEPGTEADITSFCELNYGVNFPMFAKVDVKGDKAHPLYTYMTEQAPGLLGMKAVKWNFTKFLIGKDGKVVGRFAPQTKPVDLEVEIEKVLGE

SEQ ID NO: 11986 - protein, 481 aa, Pseudomonas aeruginosa UCBPP-PA14
MNGLPMNLIWFRCDLRTTDNSALLAAADGRPCVALYLLSPAQWREHDDAPCKVDFWLRNLGELQRQLAALNIPLLVRDCGHWRQAPEVIGRLCRELGIGAVHVNQEYGVNEERRDQAVGQRLREQGVAFHSHLDQLFFAPGSVLTRTGGYFQVFSQFRKVCHERLYQALPGVRPRPQPQPPHALASDPLPDAVPAFPRPADSLRRLWPAGEEVAQERLRGFADQHLADYHERRDFPALPGTSQLSPYLAAGVLSPRQCLDAALVANRGEFSGGQQGAATWINELLWREFYKHILVGYPRVSRHRPFREETEALRWRQAPAELEAWQQGRTGIPIIDAAMRQLLATGWMHNRLRMVVAMFLSKNLLIDWREGERWFMRHLIDGDLAANNGGWQWSASTGTDAVPYFRLFNPLSQSERFDPRGEFIRHWLPELAGLERKAIHDPSSLGLFAGVDYPRPMVDLKASRERALAAFRNLPPRDGRA

SEQ ID NO: 11987 - protein, 204 aa, Xylella fastidiosa Ann-1
MHLISNDFKNGQPIPVECAAGQTDGFAPNRNPHLAWDDVPENTRSFALLCIDPDVPSIPETIGRTDMEIPVTQPRIDFVHWVMSDISTDLRMIAHGSCSDGFVVGGKTMPPGPAGTHQGLNDYTKFFANTPEMAGDYYGYDGPYPPFNDLRIHRYLFRLFALDLEHLPLPKRFDGPTLLRTIQGHVLTEATLYGTYTLNPKAQK

SEQ ID NO: 11988 - protein, 353 aa, Nicotiana sylvestris
MEVISTNTNGSTIFKSGAIPMNGHQNGTSKHQNGHKNGTSEEQNGTISHDNGNELLGNSNCIKPGWFSEFSALWPGEAFSLKVEKLLFQGKSDYQDVMLFESATYGKVLTLDGAIQHTENGGFPYTEMIVHLPLGSIPNPKKVLIIGGGIGFTLFEMLRYPTIEKIDIVEIDDVVVDVSRKFFPYLAANFNDPRVTLVLGDGAAFVKAAQAEYYDAIIVDSSDPIGPAKDLFERPFFEAVAKALRPGGVVCTQAESIWLHMHIIKQIIANCRQVFKGSVNYAWTTVPTYPTGVIGYMLCSTEGPEIDFKNPVNPIDKETAQVKSKLAPLKFYNSDIHKAAFILPSFARSMIES

SEQ ID NO: 11989 - protein, 410 aa, Burkholderia cepacia R1808
MRSLSAPQAADILGVSISTLYAYVSRGLLRSLPDGASKRRRYDADEVRLLARRRADAKRAGGVAERSLDWGVPVLESRITQIADGRLYYRGIDALTLAHDATLEETAARLWDCAPARLAAASLASTGFDAAQWRDWARRWAHLAPLERTLVLLPAAAASLPGRWAPGCDAQLDTAALLLRVTAAALAGVAPRDAPVHRQLAAAWGIRRRADADLLRRALVLCADHELNPSTFAVRCIASTGTHLFGAIAGGLAALSGPRHGGETLRAGALLDEAAHAADLDRYLAQRLARDERSEGARTALAGFAHPLYPDGDPRARALLDALCTTQPERQPLRAAGALAARVEAATGLRPTIDFALAVLERTLALPAGAGFTLFAAGRTAGWIAHAIEQYADGKLIRPRARYVGSDAPG

SEQ ID NO: 11990 - protein, 274 aa, Oceanobacillus iheyensis HTE831
MEYVTLNNGLKMPQLGFGVWKVPNEEVVSPVEHALKVGYRSIDTAKVYGNEVGVGEAISNSGIPREQLFITTKVWNSDHGYDNTLKAFDESLERLGLDYVDLYLIHWPTPEFDQYVETYKALETLYKDGKVKAIGVCNFDIEYLERILNECEIVPVLNQVECHPYLQQKELRDFCEKHNIYLESYSPLMNGKEVLQSEELQNLAERKGKTVAQTILRWHLQSGMIVIPKSVTPNRIEENLDVFDFELTDTEMQEINELDRNLRSGAVPSEMNVR

SEQ ID NO: 11991 - protein, 319 aa, Nicotiana sylvestris
MEVISTNTNGSTIFKNGAIPMNGYQNGTSKHQNGHQNGTSEHRNGHQNGISEHQNGHQNGTSEHQNGHQNGTISHDNGNELQLLGSSNSIKPGWFSEFSALWPGEAFSLKVEKLLFQGKSDYQDVMLFESATYGKVLTLDGAIQHTENGGFPYTEMIVHLPLGSIPNPKKVLIIGGGIGFTLFEMLRYPTIEKIDIVEIDDVVVDVSRKFFPYLAANFSDPRVTLVLGDGAAFVKAAQAGYYDAIIVDSSDPIGPAKDLFERPFFEAVAKALRPGGVVCTQAESIWLHMHIIKQIIANCRQVFKGSVNYAWTTVPTYPT

SEQ ID NO: 11992 - protein, 121 aa, Zea mays
VERIRPAMGSDIDVSLDCAGFSKTMSTVLEATRPGGKVCLVGMGHNEMTLPLTAAAAREVDVVGVFRYKDTWPLCIDFLRSGKVDVKPLITHRFGFSQRDVEEAFEVSARGRDAIKVMFNL

SEQ ID NO: 11993 - protein, 430 aa, Nicotiana sylvestris
MEVISTNTNGSTIFKNGAIPMNGHQSGTSKHLNGYQNGTSKHQNGHHNGTSEHRNGHQNGISEHQNGHQNGTSEHRNGHQNGTSEHRNGHQNGISEHQNGHQNGTSEHQNGHQNGTSEQQNGTISHDNGNELLGNSNSIKLGWFSEFSALWPGEAFSLKVEKLLFQGKSDYQDVMLFESATYGKVLTLDGAIQHTENGGFPYTEMIVHLPLGSIPNPKKVLIIGGGIGFTLFEMLRYPTIEKIDIVEIDDVVVDVSRKFFPYLAANFNDPRVTLVLGDGAAFVKAAQAGYYDAIIVDSSDPIGPAKDLFERPFFEAVAKALRPGGVVCTQAESIWLHMHIIKQIIANCRQVFKGSVNYAWTTVPTYPTGVIGYMLCSTEGPEVDFKNPINPIDKETTQVKSKLAPLKFYNSDIHKAAFILPSFARSMIES

SEQ ID NO: 11994 - protein, 69 aa, Triticum aestivum
  unsure (1)..(69): unsure at all Xaa locations
KHGXAXCXFVAIXIFNXXKLEXIVPSSXXCDVPHVDRQDYQLIDITDDGYVSLLPQSXHPXHHLQLXHH

SEQ ID NO: 11995 - protein, 371 aa, Archaeoglobus fulgidus DSM 4304
MAIYAFPEFDGESRRASRIYASARYPSRQEGNVFFDSEEVPNLKYADEMPLKIRNFYSVVAFRPSHIFLSRDVLGGRPLYYGSDMSISSFKSYIDGEVYEVMPGEVVKMDYTGEILERRKYAFEDVFRVGREDVNEMADRILNSLSSYKPRVGCIAFSGGVDSSLLAALYDAPLVSVTASDAEEEWLKTAARMLGKEIEILKVGESAIREVVDTVRKTIETGDFLQLSIAVPVYLTMQFAKSLGFTEIIFGQGADELFGGYKRYEGLSEHELEDALVKDLKSIGESNLVRDCKLAYKNEIKLVTPYLCWDVIDAALKIPPEYKVRREGGKVVRKYILRKIAEKFLPEEIAWRDKKAIQYSTGIAKILKKCL

SEQ ID NO: 11996 - protein, 426 aa, Psychrobacter sp. 273-4
MADNQATLTVDGKDYQLPITEGTLGPSVIDVAAFQKAGYWTYDPGFMATAPVESKITFIDGGKGELLHRGYPIDQLANNAEYLEVAYALIHGDLPNAEQKADFYEKIRKHMGVHDQLRKFFEGFRRDAHPMAIMVGVVGALSAFYHENLDISNEEHREITAIRLIAKMPTLAAMSYKYSKGEPFMYPRNDFNYAENFLYMMFATPADVNYKTNDVITRAMDKIFTLHADHEQNASTSTVRLAGSTGANPYACIAAGIAALWGPSHGGANEAVLEMLDEIGSVENVPEFMEKVKSREVKLMGFGHRVYKNFDPRAQVMKETCDEVLGALGINDPKLELAMALEKIALEDPFFVERNLYPNVDFYSGIILKAIGIPTSMFTVIFSLARTSGWISHWLEMHSTPFKIGRPRQLYTGETHRDFVKVEDRK

SEQ ID NO: 11997 - protein, 194 aa, Triticum aestivum
  unsure (1)..(194): unsure at all Xaa locations
EISRHSSVESIDICEIDQLVIDICKEFFPHLSVGFEDPRVQLHVGDAVEFLRNAPEGTYDAIIVDSSDPIGPAQELVEKPFFETIARALRPGGXLCNQAESMWLHTHLIQDMLSICRETFKGSVXYAWVXPTYPSGVIGSVCAXMATGXFLTPVIIESERLTGRNRLYQNHMHVVFALQRELSHERQREYARHK

SEQ ID NO: 11998 - protein, 506 aa, Lotus corniculatus var. japonicus
MAAAFTCSAADLHPLLGTGANATAAAEFICSRFGAISNKFTDTAYAVDNTYLLFSAYLVFAMQLGFAMLCAGSVRAKNTMNIMLTNVLDAATGGIFFYIFGFALAFGTPSNGFIGKHFFGLNEFPSPSFDYGFFLYQWAFAIAAAGITSGSIAERTQFVAYLIYSSFLTGLVYPIVAHWFWSSDGWGSPARTENLLFGSGVIDFAGSGVVHLVGAVAGFWGAFIEGPRMGRFDHAGKPVPLRGHSGTLVVLGTFLLWFGWYGFNPGSFITILKSYGESGSGNYYGQWSAIGRTAVTTTLAGCSAALTTLFGKRLQTGHWNVTDVCNGLLGGFAAITSGCSVVDPWAAIICGFVAAWVLIGCNVLAEKFHYDDPLEAAQLHGGCGTWGIIFTALFAKKQYVNEVYAGLPDRPYGLLMGGGWRLLAAHVVQILTIAGWVSVTMGAVFFVLHKLNLLRISPEEEMAGLDMTSHGGLAYEYHEDVGSVQKALKFVFDFYCKGNYYKTLLE

SEQ ID NO: 11999 - protein, 262 aa, Triticum aestivum
  unsure (1)..(262): unsure at all Xaa locations
MGSTAADMAASADEEACMYALQLVSSSILPMTLKNAIELGLLETLVAAGGKLLTPAEVAAKLPSTANPAAADMVDRMLRLLASYNVVSCTMEEGKDGRLSRRYSAAPVCKFLTPNEDGVSMAALALMNQDKVVIETWYYVKDTVPFDCIAFNXAFGMLVFEXHNTHSLIIRVYIEEMNKHFNIIGKKLLEVCKVVEXLGTIVAAYPAIKGINFDLPHVISEAPPFPGVTHVGGDMFQKVPSGDAILMKWILHDWSDEHCATV

SEQ ID NO: 12000 - protein, 219 aa, Triticum aestivum
QVCTKKQAGTGPEFPGYRRPTRAPTTRSAPEFRARSISADAAPSTRTGNLAMAAASSATSVHDFTVKDASGKDVDLSVYKGKVLLIVNVASQCGLTNSNYTELSQLYPKYKDQGFEILAFPCNQFGGQEPGTNGRIVQFACTRFKAEYPIFDKVDVNGSNVSPLYKFLKSSKGGLFGDSIKWNFSKFLVDKEGHVVDRYAPTTSPLSIEKDIKKLLGSS

SEQ ID NO: 12001 - protein, 122 aa, Triticum aestivum
  unsure (1)..(122): unsure at all Xaa locations
MAPTVMASSATSVAPFQGLKSTAGLPVSRRSNGASSAASXNGGRIRCMQVWPIEGIKKFETLSYLPPLSTEALLKQVDYLIRSKWVPCLEFSKVGFIFREHNASPGYYDGRYWTMWXLPMFG

SEQ ID NO: 12002 - protein, 216 aa, Triticum aestivum
MSPLACGFEADRSRRRAMPDSDNEDSGNAGGELSSPREQDRFLPIANVSRIMKKALPANAKISKDAKETVQECVSEFISFITGEASDKCQREKRKTINGDDLLWAMTTLGFEDYVDPLKHYLHKFREIEGERAAATSTSTTPDMPRNNNNATGYADAPGGMMMMGQPVYGSPPPPQQQQQHQHQIAMGGRAGFPYHGGGGGGGGSSSSSGFGRKEG

SEQ ID NO: 12003 - protein, 356 aa, Zea mays
  unsure (1)..(356): unsure at all Xaa locations
PQRKLDCIKRLGFGLLNKVSMLFPHVFWSTXLDTFGHLVENPRRRGEFFLTSSXAAVAGGPLLMALVAGEAAHNFETMPPTDAVSSALQILRGIYEPQGIEVPDPLQSVCTRWGTDSFSLGSYSHVAVGASGDDYDALAESVGDGRLFFAGEATTRRYPATMHGAFISGLREAANITLHANARATKSKVDRSPSTNTQACAATLTDLFRQPDLEFGSFSVIFGGKASDPKSPAILKVELGASRKKNTAEGVKTEQNHSNKLLFQQLQSHFNQQXQLYVYTLLSRQQAMELREVRGGDDMRLHYLCEKLGVKLVGRKGLGPGADAVIASIKAERNRSRTRPGPSKLKKSLKPNVAAS

SEQ ID NO: 12004 - protein, 102 aa, Brassica napus
SGRVGSVYERKASIREFYAVIFPSLLQLQRGITDLEDRKQKEVCSMRYRKKDEGKKCELSEIEMEREEECGICMEMNSLVVLPNCTHSLCIKCYRDWRGRSQ

SEQ ID NO: 12005 - protein, 179 aa, Glycine max
  unsure (1)..(179): unsure at all Xaa locations
MASSMISSPAVTTVNRAGAGMVAPFTGLKSMAGFPTRKTNNDITSIASNGGRVLCMQVWPPIGKKKFETLSYLPDLDDAQLAKEVEYLLRKGWIPCLEFELEHGFVYREHYRSXLEYYDGRYWTMWKLPMFGCTDASQVLKELQEAKTAYPNGFIRIIGFDNVRQVQCISFIAYKPPGF

SEQ ID NO: 12006 - protein, 289 aa, Zea mays
MGGGRVMATAAKVAGIGVAKGGFRGGFGVPAAANDQFIVRNTSASKPVSASISSAVHPSVEEDAVVMRKPVWEDEWEFAEVETKTIPRVVFDKPPSLQEAKEATDDLKDALNMACMEGSNEVGSVSRMFSSFQPSENRAVESAVPQVALKAFAFLSENTAAQSVVTSIASDPKVWDAVMENKDLMKFLETNTASTKDEADNDDKSELSSETESEEDSEEKPIQLMEILRDMKLKAVQMMENVSSYFGGLFRTETFTEGGQERKRMLLNDPTTLFGLAVCVIFMVVLKRA

SEQ ID NO: 12007 - protein, 395 aa, Methanosarcina barkeri str. fusaro
MNEQGLSEKEIFSYLEDVKSEDTDYYRVLSSMCTHPHRIAVEAHRLFIEANLGDLGLFAGAHRLEKEVIRMLGELLHAQSVEIPSGEACESSVCGYLTTGGTESNIQAIRGMKNLVTEDGKKSGEILNIVVPESAHFSFDKVANMMGIEVKRASLDPEFRVDIASAESLIDANTIGLVGIAGNTEFGQVDPIEELSKLALENELFLHVDAAFGGFVIPFLEKPYSFDFKVPGVTSIAIDPHKMGLSTIPSGALLFRSPFFMDSLKVNTPYLTTKSQFTLTGTRSGASAAATYAVMKYLGREGYRKNVQYCMQLTTKLVKEARKFGFEPLIEPVMNVVDLRVPNPDIVREQLLKKFGWNVSITRNPRSLRLVLMPHNTARDIEEFLQDLRKVTTEL

SEQ ID NO: 12008 - protein, 220 aa, Bacillus cereus ATCC 14579
MNLKQLAGEYAANFVNDGMKIGLGTGSTVYWTIQKLGERVKEGLSFQAVPTSKETEALAQQLNIPLISLNDVQSLDLTIDGADEIDSNLQLIKGGGGALLREKIVASSSKKLIIIADESKLVTHLGTFPLPIEIIPFSWKQTENKIQSLGCQTTLRLKNNETYITDNNNMIIDCIFPNHISNPVHLHTQLKMITGVVETGLFISMTSTAIIGTKNGIKKL

SEQ ID NO: 12009 - protein, 273 aa, Arabidopsis thaliana
MYICTNVHLSPLSLHHLACEFINSCEMEPRINDLQVESRVHELLDFPVHTNQISSAIYEILLQCPNDHIENPKKKPYNCPHSGAKCDVTGDIQRLLLHLRNDHNVEMSDGRSFSHRYVHHDPKHLHHATWMLTVSYITDYLALFLQLCEFLSFNPLETMQLLDCCGRKFCLYFEAFHLRKTPMYMAFMQFMGDEEEAMSFSYSLQVGGNGRKLTWQGVPRSIRDSHKTVRDSQDGLIITRKLALFFSTDNNTTDKELKLKVSGRVWREQPVSI

SEQ ID NO: 12010 - protein, 174 aa, Triticum aestivum
  unsure (1)..(174): unsure at all Xaa locations
DAIGVTPLYIGWGIDGSVWISSEVKGLNDDCEHFEIFPPGHLYSSKQGGFKRWYNPPWFSEVIPSVPYDPLALRKAFEKAVIKRLMTDVPFXVLLSXGLDSSLVAAVTVRHLAGTKAAKRWGTXLHSFCVGLEGXPDLKAAKEVXNYLGTMPMSSPSCSDGIDXIEDVXYHPNI

SEQ ID NO: 12011 - protein, 122 aa, Oryza sativa
IMRILKDYNQYVMRNLARGYSRKDLGVAYVKEKQLQVNMKINKLRETVKAHQEKLQTVAKTAGINHEEWLANADRWVAGFLEKFEEHCHNMETAIKGRIQEKLRRQTSRGIIGGLMQQPVAA

SEQ ID NO: 12012 - protein, 319 aa, Agrobacterium tumefaciens str. C58
MRTIYRYDICLRLKPIAPTPVKERLLPLTGLFRRPCFQQTGETPMYDVSANGANIPALGFGTFRIPEDDVRRILPEALKLGFRHVDTAQIYKNEGAVGEVIAQSGISRHDIFLTTKVWVDRYRHDDFLASVDESLAKLKTDYFDLLLLHWPKSDVPLAERMGALNAVRKAGKARNIGISNFNVALTEEAVKLSDTPLATNQIEYHPYLDQTKVISAARKHGMSVTAYYLMADGKVPNDPVLKDIGAKHGKTAAQVTLRWAVQQPDIVALSKTATESRLKENFDIFDFALSEEEMQAIHALAKPNGRIVSPGHLAPDWDD

SEQ ID NO: 12013 - protein, 112 aa, Bartonella sp. af108nev
ANEACLKMLQEIGSVKRIPEFIARAKDKNDPFRLMGFGHRVYKNYDPRAKIMQKTCHKVLKELNIQDDPLLDIAIELEKIALNDEYFVEKKLYPNVDFYSGITLKALGFPTE

SEQ ID NO: 12014 - protein, 50 aa, Enterococcus faecalis
KGFGFISPEDGNDVFVHFSAIQGDGFKTLEEGQAVTFDVEDGHRGPQAAN

SEQ ID NO: 12015 - protein, 193 aa, Triticum aestivum
DASCLDRPLLPSPRAPPSPSSSSIPMQQRRGRPSGTDGSDFSYRMVVDSRYQRVADGRSRLARLMLVQTLHQVAGGALLLLSLSKGTEINKFAVLSLAAGLLAILLGEFGRRRTVAVFLRLYTSLSSIAIAFSVTCIIRSDLFVKITKQNTADITSYEMFDVVRVALGVLLQLVVIATTTRLLQNMSPPKRTS

SEQ ID NO: 12016 - protein, 50 aa, Pediococcus pentosaceus
KGFGFITREDGSDVFVHFSAIQSDGFKTLEEGQSVSFDVEESDRGPQAAN

SEQ ID NO: 12017 - protein, 363 aa, Escherichia coli O6
MSKNYHIAVLPGDGIGPEVMTQALKVLDAVRNRFAMRITTSHYDVGGAAIDNHGQPLPPATVEGCEQADAVLFGSVGGPKWEHLPPDQQPERGALLPLRKHFKLFSNLRPAKLYQGLEAFCPLRADIAANGFDILCVRELTGGIYFGQPKGREGSGQYEKAFDTEVYHRFEIERIARIAFESARKRRHKVTSIDKANVLQSSILWREIVNEIATEYPDVELTHMYIDNATMQLIKDPSQFDVLLCSNLFGDILSDECAMITGSMGMLPSASLNEQGFGLYEPAGGSAPDIAGKNIANPIAQILSLALLLRYSLDADDAASAIERAINRALEEGIRTGDLARGAAAVSTDEMGDIIARYVAEGV

SEQ ID NO: 12018 - protein, 439 aa, Zea mays
MTPFHFSTSPAAHFSVSARECGEKGGNSPLSGRRIPPFLFGARTRTPHAAQCTPPFPPPCCCESATTGGKIFSFTFLPFPPAHARALIDAMGDAAASTSAPTTPTSILICLEDGSDLLADADDGAGTDLVVARDERLLVVDQDEEYVALLLSKESASGGGGPVEEMEDWMKAARSGCVRWIIKTTAMFRFGGKTAYVAVNYLDRFLAQRRVNREHAWGLQLLMVACMSLATKLEEHHAPRLSEFPLDACEFAFDRASVLRMELLVLGTLEWRMVAVTPFPYISCFAARFRQDERRAVLVRAVECVFAAIRAMSSVEYQPSTIAVASILVARGRETPAGNLDALKAILGSSFPQLDTGHVYSCYSAMIREDDKSPTQSTSTSTGVASSGVSVAAHAGGSGSPSPPGASVSVGANNAAGTAPPATTDNRNKRRRLRSPQRQ

SEQ ID NO: 12019 - protein, 140 aa, Pirellula sp. 1
MTMSDEATAVAEYSAEAKELGDKIANMTLKQAKELSDYLKDEHGIEPAAGGGAVMMAGPAGDGGGAAEVEQTEFDVVLTGFGEKKLNVVKVVKNITGASLMDAKKMVEGCPATLKEAVSKEDAEKVKAEIEEAGGSVELK

SEQ ID NO: 12020 - protein, 173 aa, Oryza sativa (japonica cultivar-group)
MAGVGRNMLAPLLVLNLIMYLIVIGFASWNLNHFINGQTNYPGVAGNGATFYFLVFAILAGVVGAASKLAGVHHVRAWRHDSLATNAASSLIAWAITALAFGLACKEIHIGGHRGWRLRVLEAFVIILAFTQLLYVLMLHTGLFGGGDGAYRDHDYGVGAGAAAGEPKGTARV

SEQ ID NO: 12021 - protein, 229 aa, Brassica napus
  unsure (1)..(229): unsure at all Xaa locations
MALENQSAARFTGKVNWFNDSKGFGFITPDDGTTEELFVHQSSIVSEGYRSLAIDDLVEFEIAQGTDGKTKAVEVTAPGGAPLKKKEASSRGRSGRGGGCYNCGEAGHLAKDCRDGGERGACYTCGDTGHLARDCVQKPSGERGGGRGGGGGCYQCGDTGHLARDCDNIGGGGRSSGGCYECGGAGHMARDCEKRGSGGGGGRSSGGGGGGKCYKCGEGGXFARECSVA

SEQ ID NO: 12022 - protein, 509 aa, Triticum aestivum
MASFARQEHQFLAELGLAPRNPGSFACGAWGGSGPVVTTTNPSNNEVIAEVVEASMDDYEKGMSACFDAAKTWMAIPAPKRGEIVRQIGDALRAKLHHLGRLLSLEMGKILPEGIGEVQEIIDMCDYAVGLSRQLNGSIIPSERPNHMMMEVWNPLGVVGVITAFNFPCAVLGWNACIALVCGNCVVWKGAPTTPLITIAMTKIVASVFEKNNLPSAIFTAFCGGAEIGQAIALDTRIPLVSFTGSTKVGQMVQQQVSARFGKCLLELSGNNAIIVMDDADIPLAVRSVLFAAVGTAGQRCTTCRRLLLHESIYQTFLDQLVEVYKQVRIGDPMEKGTLLGPLHTTASKESFLKGIQNIRSQGGKILLGGSAIESEGNFVQPTIVEISPSAPVVREELFGPVLYAMKFQTLKEAIEINNSVPQGLSSSIFTRKPDAIFKWIGPHGSDCGIVNVNIPTNGAEIGGAFGGEKATGGGREAGSDSWKQYMRRATCTINYGSELPLAQGINFG

SEQ ID NO: 12023 - protein, 408 aa, Picrophilus torridus DSM 9790
MIYAGNFYYKDHFEYLEIDVNNGIITSIKKNIPGKKIKLNGAVMPAGTDSHVHFRDPGETYKEDFSTGTMSAIFGGTTTIIDMPNNKIRIDNYQAFSDKLAIVSRKAYCDFGLYSMFTGDNSLIIDKRSTGIKIYMGNTTNTNGSDITNEEISKIKDLNVPVFFHAEDSECLKKHYFNAKNLKEYDKSRPVECEILSVEKIKNYDLNTKVIAHKTFIDKIEMLSEASPHHLLLNNDMDLGSYGKVNPPLRSRSAQSLLLNSYISGNFDILSSDHAPHSQNEKTDFEYALPGIIGVETRIPLMLALVSKKILPIDVFYKTAIYNPAKLFKIRKGVIDNGYYADFFSFDYHNIERLNDYKLHSKNPVSPFNGFDVIFPDSVVLRGDVIIDNREILDERSGKFINELNQSA

SEQ ID NO: 12024 - protein, 344 aa, Escherichia coli
TPDCYQAADWRHRGYHAVELPGGDDYPQSRSGAGSRLHHGAEARQSDAVLCLALAELAIRAGVPAGVFNVVTGSAGAVGNELTSNPLVRKLSFTGSTEIGRQLMEQCAKDIKKVSLELGGNAPFIVFDDADLDKAVEGALASKFRNAGQTCVCANRLYVQDGVYDRFAEKLQQAVSKLHIGDGLDNGVTIGPLIDEKAVAKVEEHIADALEKGARVVCGGKAHERGGNFFQPTILVDVPANAKVSKEETFGPLAPLFRFKDEADVIAQANDTEFGLAAYFYARDLSRVFRVGEALEYGIVGINTGIISNEVAPFGGIKASGLGREGSKYGIEDYLEIKYMCIGL

SEQ ID NO: 12025 - protein, 197 aa, Brassica napus
  unsure (1)..(197): unsure at all Xaa locations
MCGILAVLGCTDDSQAKRVRVLELSRRLRHRGPDWSGIYQHGDNYLAHERLAIVDPDSGDQPLFNEDKTIVVTVNGEIYNHEELRKDLKNHKFRTGSDCDVISHLYEEHGENFVDMLDGVFSFVLLDTRDNSFMVARDAIGVXSLYIGWGLDGSVWISSEMKGLHEDCEHFEVFPPGVLYSSKSGGFKQWYNPPWYN

SEQ ID NO: 12026 - protein, 372 aa, Zea mays
PRVRSKTKIYIVMELVTGGELFDKIASRGRLKEDDARKYFQQLINAVDYCHSRGVYHRDLKPENLLLDASGTLKVSDFGLSALSQQVREDGLLHTTCGTPNYVAPEVINNKGYDGAKADLWSCGVILFVLMAGYLPFEDSNLMSLYKKIFKADFSCPSWFSTSAKKLIKKILEPNANNRITIAELINNEWFKKGYQPPRFETADVNLDDVNSIFDESGEPAQLVVERREERPSVMNAFELISTSQGLNLGTLFEKQTGSVKRETRFASRLPANEILSKIEAAAGPMGFNVQKRNYKLKLQGENPGRKGQLAIATEVFEVTPSLYMVELRKSNGDTLEFHKFYHNISNGLKDVMWKPESGIVEGDEARQRRSP

SEQ ID NO: 12027 - protein, 486 aa, Bordetella parapertussis 12822
MEDLRNHEFKNYIGGQWVACAAGKTYPNVNPADTDDIVGRFQASQAEDAAAAVAAAQAAFDGWRNLAVSKRAALMQRAADYLEAHAEQFGRELTREEGKALNLAKDEVLRSAQTIRFYAAEGQSFSGETFVNDDPDMVVYSQREPLGVVTVISPWNFPVSIPARKIAPALITGNTVVFKPSSDAPLSGLRLVEAFEQAGLPPGVLNLVTGSASAIGAAITQAPQVRAVSFTGSTAAGEQIHRSVDMTTRTQMELGGKNPLIVMADADLDRAVDLVVKGGFSLSGQACTGTSRVLVDAPVKAAFTEKLLAKVKALKVGNSLEGSFDLGPLATARQLESVMRYIEVGKQEARLLYGGERLDGPGYERGYYLTPAVFADVTQQMRIAREEIFGPVIALIEVNGYEDAIAKANDTEYGLAAAIATTNAQYAHRFARDIQAGTVKINRTTTGNLINAPFGGLKRSSTSTFRESGRIGLEFYTQIKTVYRAG

SEQ ID NO: 12028 - protein, 333 aa, Magnaporthe grisea 70-15
MASRAPIRRVDPELGLIWEGAPNMDTLSDVPAVRDAFASHYPDIFGLPHLPVSTQRPSHNVKSADGTQIKVMHFIPDAPAGIDAPPARAVIFCFGGGFIMGKADSNIDFAANMAIQTHSHVFMPNYRLAPEHPAPAAVEDVYATLRWVQTHAAGLGINAERVVLFGVSAGGGIATGTALMAYDKSLTSSEKLPLPAGLALRYPMLDDRTFGSIEDPEHFYHVWNCVVNKIAWTAYAGGKARAERTNDTISVYAAPARAGPDKLRGLPPTFVDVGGLDLFREEITKFVTALATAGVNVEFHHYSGLPHGVEIMAPGISKAIAMNKNTCRFIGRF

SEQ ID NO: 12029 - protein, 243 aa, Zea mays
MFGYRKADPDLEAGGSSLLYPGMTESPELRWAFVRKIYVILTVQLAMTAAVSAFVVKVPAVSNFFVSSNAGIALYIFLIVLPFIVLCPLHYYHQKHPVNLLLLGLFTVAISFAVGMTCAFTSGKIILEAAILTAVVVNSLTAYTFWAAKRGHDFNFLGPFLIAAIMVLMVFSLIQIFFPLGKISVMIYGGLASLIFCGYIIYDTDNIIKRHTYDQYIWAAVSLYLDVINLFLSLLQLLRAADS

SEQ ID NO: 12030 - protein, 158 aa, Glycine max
  unsure (1)..(158): unsure at all Xaa locations
FLILISKQRLPHDHFPTVTTVNRAGAGLDAPLTGLKSMAGFPTRKXTNNDITSLASNGGRLQCMRGWPPGGKNNLETLSYLPDLDDAQLPKXVEYLLRKGWIPCLEFXLEHGFESREHTRKPGYYHGRYWTMWKLPMFGCTDAPEVLKELQEANTAYP

SEQ ID NO: 12031 - protein, 196 aa, Fucus distichus
MQNIKCVVVGDGAVGKTCLLISYTTNAFPGEYIPTVFDNYSANVMVDGKPINLGLWDTAGQEDYDRLRPLSYPQTDVFLVCFSVVDPTSFHNVKLKWIPELQHHAPGIPFILVGTKLDLRDDQDAIKRLAERRQTPISFSEAQGLSSDLEAYRYLECSALTQHGLKQVFDGAIRCVLEQNQRKMKKKKGKKGCVIS

SEQ ID NO: 12032 - protein, 131 aa, Hordeum vulgare subsp. vulgare
PNLLELEAPIKICGDIHGQYSDLLRLFEYGGFPPEANYLFLGDYVDRGKQSLETICLLLAYKIKYPENFFLLRGNHECASINRIYGFYDECKRRFNVRLWKVFTDCFNCLPVAALIDDKILCMHGGLSPDL

SEQ ID NO: 12033 - protein, 356 aa, Cordyceps bassiana
MSRANPPNNASASRKISFNVSEQYDIQDVVGEGAYGVVCSAIHKPSGQKVAIKKITPFDHSMFCLRTLREMKLLRYFDHENIISILDIQKPRGFDSFNEVYLIQELMETDMHRVIRTQVLSDDHCQYFIYQTLRALKAMHSANVLHRDLKPSNLLLNANCDLKVCDFGLARSAASQEDNSGFMTEYVATRWYRAPEIMLTFKEYTKAIDVWSVGCILAEMLSGKPLFPGKDYHHQLTLILDVLGTPTMEDYYGIKSRRAREYIRSLPFKKKVLFRTLFADTSDLALDLLEKLLAFNPVKRITVEEALKHPYLEPYHDPEDEPTAPPIPEEFFDFDKHKDNLSKEQLKQLIYQEIMR

SEQ ID NO: 12034 - protein, 50 aa, Bifidobacterium animalis
KGFGFITGEDGQDVFVHFSAINGEGYKSLDKGQAVSYNVKQSDRGPQAAN

SEQ ID NO: 12035 - protein, 438 aa, Zea mays
MAEKENILMQRYEMGKLLGKGSFAKVYHARNVKTSESVAIKVIDKDKIKKCGLMDQIIQEISVMKLVKHPNIVQLYEVMATKTKIYFVIEYVKGGELFKKVQRGRLKEDVARTYFQQLISAVDFCHTRQVYHRDLKPENLLLDGSHNLKISDFGLSALPNCKRKDGLLHTICGTPAYVAPEVISQKGYDGAKADIWACGVILYVLLAGYLPFQDKNMMDMYKKICKAELKWPSWFSSDVRKLLRRILHPNPNRRISIEEIRTHPWFRIGLDARLFDSTTRDYVPSDMDLALNSLNSNMVECNSAAEKLTILNAFDIISLSNGFDLSGIFENSNKESKFMSTNTAMTIITKLMEVAKSLDLKVITKTGGLLNMEAAKSGIKGVMSINAEIFQITPNYHLVEIKKINGDILEYHNFMNQSMRPALEDIVWAWHGEQPDEK

SEQ ID NO: 12036 - protein, 169 aa, Triticum aestivum
  unsure (1)..(169): unsure at all Xaa locations
MAPTVMASSATSVAPFQGLKSTAGLPVSRRSNGASLGSVSNGGRIRCMQVWPIXEGIKKFETLSYLPPLXTEALLKQVXYLDPSKWVPCLRFSKLGXLPXEHNASPGYYDGRYWAMWNCLCSGCTDATQVINEGGGVKKDTLTLFRIIXSTNLKCMRSYPLNNCKIPEG

SEQ ID NO: 12037 - protein, 501 aa, Oryza sativa (japonica cultivar-group)
METRELWVLAAALAVSLLYYLAALMRYAGGGCSRSSRPPLPPGPTPLPLIGNLLSLRGVLHHRLASLARVHGPVMALRLGLTTAVVVSSRDAAAEAFTKHDRRLAARVVPDSNRAHGFSDRSIIWLPSSDPRWKALRGIQATHLFSPRGLAAVRSVRESKVRDIVAYFRSRAGEEVVFGEAIYSGVLNLVSSSFFSVNMAGVGSEEAHGLRELVEDLVEAIAKPNVSDLFPFLRQLDLQGLRRRTEERMARAFGILDGIIDRRLANRTHGDRHGDFLDALLDLVSEGKMARDHVTIMLFEVFGAGSDTMSVSLEWAMAELLRNPRAMRKARAELEDAAAVVEESDAARLPYLQAVVKEAMRLHPVGPILLPHRAVEDGVEIGGYAVPRGAMVIFNAWAIMRDPAAWERPDEFVPERFMETTTAIDFRGKEYEYLPFGSGRRLCPGLPLAERVVPFVLASLLRAFEWRLPDGVSAEDLDVSERFNTANVLAVPLKVVPVIVN

SEQ ID NO: 12038 - protein, 429 aa, Agrobacterium tumefaciens str. C58
MTEKSATVTLGEKQVELPVREGTIGPSVVDIATLYKHTGSFTYDPGFTSTASCESKITYIDGDEGVLLHRGFPIEQLAEQGDFLETCYLLLYGELPTAAQKKDFDTRVTRHTMVHEQMSRFFTGYRRDAHPMAVMCGTVGALSAFYHDSTDITDPHQRMVASLRMIAKMPTIAAMAYKYHIGQPFVYPKNDLDYASNFLHMCFAVPCEDYKVDPVLARAMDRIFILHADHEQNASTSTVRLAGSSGANPFACIAAGIACLWGPAHGGANEAALNMLNEIGSVDRIPEYIARAKDKNDPFRLMGFGHRVYKNYDPRAKIMQKTMYEVLEATGNSDDPIMQVALELEKIALSDPYFVEKKLYPNVDFYSGITLKALGFPTTMFTVLFALARTVGWIAQWNEMIEDPQQRIGRPRQLYTGAGKRDYVPVSKR

SEQ ID NO: 12039 - protein, 495 aa, Thermus thermophilus
MPLITTETGKKMHVLEDGRKLITVIPGDGIGPECVEATLKVLEAAKAPLAYEVREAGASVFRRGIASGVPQETIESIRKTRVVLKGPLETPVGYGEKSANVTLRKLFETYANVRPVREFPNVPTPYAGRGIDLVVVRENVEDLYAGIEHMQTPSVAQTLKLISWKGSEKIVRFAFELARAEGRKKVHCATKSNIMKLAEGPKRAFEQVAQEYPDIEAVHIIVDNAAHQLVKRPEQFEVIVTTNMNGDILSDLTSGLIGGLGFAPSANIGNEVAIFEAVHGSAPKYAGKNVINPTAVLLSAVMMLRYLEEFATADLIENALLYTLEEGRVLTGDVVGYDRGAKTTEYTEAIIQNLGKTPRKTQVRGYKPFRLPQVDGAIAPIVPRSRRVVGVDVFVETNLLPEALGKALEDLAAGTPFRLKMISNRGTQVYPPTGGLTDLVDHYRCRFLYTGEGEAKDPEILDLVSRVASRFRWMHLEKLQEFDGEPGFTKAQGED

SEQ ID NO: 12040 - protein, 360 aa, Agrobacterium tumefaciens str. C58
MNMVVTYKHIDEMKPWSDKLQLLECISVTPETSDVMTFLFRSEDQNWFRYLPGQFVTLELPVGSEPIYRTYTLSSSPSRPYALSVTVKAQATSIGTRWMFDNLKPGMKVRALGPLGDFSYVKHPGDKYLFISAGSGVTPMMSMVRDMSDRAPQSDITFINCSRTPGDIVFRHELEYLARFMPNLSLGFIVEKCGRTDLWSGLRGMVDKAKIALLAHDFMDRTVFCCGPEPFMAAVRSMLDASGFDMSRYHQESFAPAAPVSVGETVLTGADGEALSMVGFTLSGKELPCQPGQTVLMTARAAGVRIGAACESGICGTCRVLKLSGEVEMNHNGGILDEEIEEGYILACCSRPLTDIKVEA

SEQ ID NO: 12041 - protein, 373 aa, Arabidopsis thaliana
MGYLLEETLSSNSKTPIVIDDDNELGLMAVRLANAAAFPMVLKAALELGVFDTLYAEASRSDSFLSPSEIASKLPTTPRNPEAPVLLDRMLRLLASYSVVKCGKVSEGKGERVYRAEPICRFFLKDNIQDIGSLASQVIVNFDSVFLNTWAQLKDVVLEGGDAFGRAHGGMKLFDYMGTDERFSKLFNQTGFTIAVVKKALEVYQGFKGVNVLVDVGGGVGNTLGVVASKYPNIKGINFDLTCALAQAPSYPGVEHVAGDMFVDVPTGDAMILKRILHDWTDEDCVKILKNCWKSLPESGKVVVIELVTPDEAENGDINANIAFDMDMLMFTQCSGGKERSRAEFEALAAASGFTHCKFVCQAYHCWIIEFCK

SEQ ID NO: 12042 - protein, 112 aa, Glycine max
  unsure (1)..(112): unsure at all Xaa locations
MASSMISSPAVTTVNRAGAGMVAPFTGLKSMAGFPTXKTNNDITSIASNGGRVQCMQVWPPVGKKKFETLSYLPDLDDAQLAKEVEYLLMKGWIPCLEIQLEQRFVFREPHQ

SEQ ID NO: 12043 - protein, 435 aa, Bacillus cereus ATCC 10987
MGVITLTTGEKITVTNGVMNVPNNPIIPFIEGDGIGPDIWAAASRVLEAAVEKAYDGEKKIVWKEVLAGEKAFNQTGEWLPEETLNLIREYLIAIKGPLTTPVGGGIRSLNVALRQELDLYVCLRPVRYFEGVPSPVKRPEDTDMVIFRENTEDIYAGIEYAQGSPEAEKVLTFLKEAMGVNKIRFPETSGIGIKPISEEGTKRLVRAAIQYAINEKRSSVTLVHKGNIMKFTEGAFKNWGYEVAEQEFGDKVFTWAEYDRIVEKDGKDAANKAMADAEVAGKIIVKDSIADIFLQQILTRPREFDVVATMNLNGDYISDALAAQVGGIGIAPGANINYVTGHAIFEATHGTAPKYAGLDKVNPSSVLLSGVLLLEHLGWNEAAKLVTASVEKTIASKVVTYDFARLMEGATEVKCSEFANELIKNMDVAIIKNA

SEQ ID NO: 12044 - protein, 496 aa, Staphylococcus epidermidis ATCC 12228
MELVDKLSNRQYIDGEWVESSNKNTRDIINPYNQETIFTVAEGTKEDVERAILAARRSFEDGEWSLETSEVRGKKVRAVADKIKENREELAKLETLDTGKTLEESYADMDDIHNVFMYFAGLADKDGGEIINSPIPNAESKVVKEPVGVVTQITPWNYPLLQASWKIAPALATGCSLVMKPSEITPLTTIRVFELMEEVGFPKGTINLVLGAGSEVGDVMSGHEEVDLVSFTGGIETGKHIMKQAANHVTDVALELGGKNPNIIFDDADFELAVDQALNAGYFHAGQVCSAGSRILVHNDIKDKFEKALIDRVSKIKLGNGFDQDTEMGPVISTAHRDKIEGYMEVAKKDGATIAIGGKRPEREDLQAGLFFEPTVITDCDTSMRIVQEEVFGPVVTVEGFADEEEAIRLANDSIYGLAGAIFTKDIGKAQRVANKLKLGTVWINDFHPYFAQAPWGGYKQSGVGRELGKEGLEEYLVSKHILTNTNPEPVDWFSK

SEQ ID NO: 12045 - protein, 371 aa, Bacillus cereus ATCC 10987
MTVIRGLEGVVATTSSVSSIIDDTLTYVGYNIDDLAENATFEEVVYLLWHRKLPNEQELAEFKEIVSEYYKVPGEILAYLKQVDLKIAHPMSVLRTAISMLSLYDESAEIMDEKSNYLKAVKLQAQVGTLVAAYARIRKGLDVVEPRNDLSLAANFLYMLNDREPNEVEIEAFDKALVLHADHELNASTFTARVCVATLSDVYSGITAAIGALKGPLHGGANENVMKMLTEIGEEENVESYIHNALQNKVKIMGFGHRVYEHGDPRAKHLREMSKRLCVLLGEEKWYNMSIKIEDIVTKEKGLPPNVDFYSASVYHCLGIDHDLFTPIFAISRMSGWLAHILEQYENNRLIRPRADYNGPTHQVYVPIAQR

SEQ ID NO: 12046 - protein, 144 aa, Rubrobacter xylanophilus DSM 9941
MLSPFRGFRDLQSEMDRLFGEAFGRPPRADAEGGWTPAVDVLTRGDDLIIRAELPGVRREDVEVTVSNGVLTLAGERREEEERERAGYLIRERRQGSFRRSMTLPEGVNEDEIKATFRDGVLEVSVPGASAAVEAPPRRIEIEG

SEQ ID NO: 12047 - protein, 255 aa, Triticum aestivum
MAMEARMKGTVKWFNDTKGFGFISPDDGSEDLFVHQSSINADGFRSLAEGEVVEFAVSEGDDGRTKAVDVTGPDGSFVQVGAGGGGGGFGSRGGGGSRGGGGFGGRGGDGSGGYGGGYGGGGSGGWGGQRRSGGGGAGGACFKCGEPGHMARDCSVNGPAGGGGGGGCYKCGEQGHIARDCFNGGAGGGGGGYGGGGGGNCYSCGEPGHIARDCPTSSGFGGGGGGRFGGGGGGGGDRTCYHCGETGHISRDCTK

SEQ ID NO: 12048 - protein, 142 aa, Chlorobium tepidum TLS
MALTLYGKDPLKMFEDVFNERLTPFISSMGSMMAPAFKVDISEDEKAIYLSADIPGVKKEDVKVSIEDDVISISAERTQEEEEKKKNYHRVERSWGSLSRSFTIGDNVDSDNITANYDNGVLKVVIPKKEPEQKKSKEIAVS

SEQ ID NO: 12049 - protein, 73 aa, Triticum aestivum
MASRSCTFVEILLAVILPPLGVFLRYGCCSMEFLICLLLTILGYIPGIIYAIYVLVAHGSASEESGKDYDALA

SEQ ID NO: 12050 - protein, 365 aa, Zea mays
  unsure (1)..(365): unsure at all Xaa locations
MGSTAGDVAAVVDEEACMYAMQLASSSILPMTLKNAIELGLLEVLQKEAGGGKAALAPEEVVARMPAAPGDPAAAAXAMVDRMLRLLASYDVVRCQMEDRDGRYERRYSAAPVCKWLTPNEDGVSMAALALMNQDKVLMESWYYLKDAVLDGGIPFNKAYGMTAFEYHGTDPRFNRVFNEGMKNHSVIITKKLLDFYTGFEGVSTLVDVGGGVGATLHAITSRHPHISGVNFDLPHVISEAPPFPGVRHVGGDMFASVPAGDAILMKWILHDWSDAHCATLLKNCYDALPENGKVIVVECVLPVNTEATPKAQGVFHVDMIMLAHNPGGKERYEREFRELAKGAGFSGFKATYIYANAWAIEFIK

SEQ ID NO: 12051 - protein, 365 aa, Triticum aestivum
MGKGGKGEAAAAVAGEGENMAAWLVAKNTLKIMPFKLPPLGPYDVRVRMKAVGICGSDVHYLKEMRIAHFVVKEPMVIGHECAGIIEEVGDGVKHLAVGDRVALEPGISCWRCRHCKGGRYNLCDDMKFFATPPYHGSLADQIVHPGDLCFKLPDNVSLEEGAMCEPLSVGVHACRRADVGAEKSVLIMGAGPIGLVTMLSARAFGAPRIVIADVDDHRLSVAKSLGADAVVKVSGNTEDLAGEIERIQAAMGGDIDVSLDCAGFSKTMSTALEATRPGGRVCLVGMGHNEMTVPLTSAAIREVDVVGIFRYKDTWPLCLEFLRSGKIDVKPLITHRFGFSQGEVEEAFEVSARGRDAIKVMFNL

SEQ ID NO: 12052 - protein, 206 aa, Schizosaccharomyces pombe
MNDHLKVVVTILNLPTPISLAPYFTSSIILKYSMFRIASRQTRNLRALSSSKNWARSLVNTRSFRAAASVQNNNAQIGEMVDKISSLSLLETSELVKQLKEKLNIAEIAPMAAVAPAVASAAPSEEKAPEEKKEEKTTWNLKLESFDAGSKAKVIKEVKSLLGLSLVDAKKFVESAPKVLKENILKEDAEAIKSKLEKLSCKVVLE

SEQ ID NO: 12053 - protein, 413 aa, Arabidopsis thaliana
MGSGRYLDDPLTFTRNPPSSSSPITESSFLAESISRSGSFESGSLRGGDGDCFSDVDFALDKLAGTVQFYERHVFLCYKKPSVWPARIEASEFDRLPRLLSSVISARKSSMKKETLLTICEGHDGSETSNGDVLIFPDMIRYRRLTHFDVDTFVEEVLVKGVEWLPGNPESLSSSYVFVCCHGSRDRRCGVCGPSLVSRFREEIDSCGLRGEVSVSPCSHIGGHKYTGDVIIYGLNINQRVTGHWYGCVTLEDVPLLLEQHINKGEIVDRLWRGEMGLPEEDQKKTQEQRLQLNSEKISNREVTQESVNNSICCQSRAVPELNGSGCQQNGNSSYCLEEIHTEKNTSERVTSVKNASLRIGSSENGSSGGFKVCAVMSMWLETWEREDTYAALAVACAAASVAIAYNCYKQLK

SEQ ID NO: 12054 - protein, 350 aa, Escherichia coli CFT073
MRFLLGVLMLMISGSALATIDVLQFKDEAQEQQFRQLTEELRCPKCQNNSIADSNSMIATDLRQKVYELMQEGKSKKEIVDYMVARYGNFVTYDPPLTPLTVLLWVLPVVAIGIGGWVIYARSRRRVRVVLEAFPEQSVPEGKRAGYVVYLPGIVVALIVAGVSYYQTGNYQQVKIWQQATAQAPALLDRALDPKADPLNEEEMSRLALGMRTQLQKNPGDIEGWIMLGRVGMALGNASIATDAYATAYRLDPKNSDAALGYAEALTRSSDPNDNRLGGELLRQLVRTDHSNIRVLSMYAFNAFEQQRFGEAVAAWEMMLKLLPANDTRRAVIERSIAQAMQHLSPQESK

SEQ ID NO: 12055 - protein, 106 aa, Zea mays
MEHGSLTDSTSSTFSIMDEDHTLANSARFVLNQDPRVAFCGYTIPHPSEKKVNIRLQTTGDAAKDVLKDALQNLMIMCQHVRGTMDTAVVNHRAKNAAEEMDVDQN

SEQ ID NO: 12056 - protein, 203 aa, Candidatus Ehrlichia extremiorentalis
ESKITFIDGNKGILRYRGYNIEDLVKSCKSFIEVVYLLFYGTFSDIEDLQNFMLQISQEYMPPKIVEDVVKSFPQNSHPMAILMACFSALASYYYDQRIIKDELKCITLAVSKIAGIVAIIYRHITGQNFIQANKELTYSENFVHMMFDIFSYKFTQVVSKALDIIFILHADHEQNASTAAVRLSGSSGANLFACLGAGAATL

SEQ ID NO: 12057 - protein, 109 aa, Glycine max
MSGVWVFKNGVVRLVENPGGEAVEGSRGGRRKVLVHRASNEVITSYAVLEQKLYSLGWERYYDDADLLQFHKRSTVHLISLPRDFNKFKPMHMYDIVVKNKNAFEVRDM

SEQ ID NO: 12058 - protein, 353 aa, ASPERGILLUS NIDULANS FGSC A4
MRAVRFHGRRDIRVDQIDEPSCAEGQVKIRPAFVGICGSDLHEYLSGPIAIPTTPHPLTGAQLPVTLGHEFSGTIEEVGQGVTGFKVGDRVAVRPNLSDGTCASCVYGRPNCCRSLGFIGFSSNSGGLSDYVTVPAKHAILLPESVPLDLGALVEPLTVAWHAVARSPHETARTALVVGGGPIGLAVVQVLKARGVQTVVVAEVSTQRREYALTLGATHVFNPLTDDVVARVRSLTDNAGADISFECSGVQAGFDTAMNGIRVRGTTTIVSLWEKKPMIDAFDVVSYEKHVIGAAICDDGDFEAVIGAIKDGKLNPRPMITSKIRMEDVEEKGFKALVDEKDKHVKILIDIAA

SEQ ID NO: 12059 - protein, 117 aa, Oryza sativa (japonica cultivar-group)
MARAQLVLVAVVAALLLAAPHAAVAITCGQVNSAVGPCLTYARGGGAGPSAACCNGVRSLKSAARTTADRRTACNCLKNAARGIKGLNAGNAASIPSKCGVSVPYTISASIDCSRVR

SEQ ID NO: 12060 - protein, 181 aa, Brassica napus
MASVMLSSATMASSPAHATMVAPFIGLKSSAAFPVTCKANTKVTSITSNGGRVNCMKVWPPVGKKKFETLSYLPDLTDVEIAKEVDYLIRNKWTPCIEFELEHGFVYREHGNIPGYYDGRYWTMWKLPLFGCTDSTQVLKEVKKCKQESPNPFIRIIGFDNNRQAQCISFFAYKPPSFTDA

SEQ ID NO: 12061 - protein, 217 aa, Chloroflexus aurantiacus
MQIYLDTANLAEIREAASWGILSGVTTNPTLIAREKGADFKAIITEIAELVDGPISAETISLDAEGMVREGLEYASWHPNVIIKVPSTTEGLRAVSQLAKHGIRCNVTLCFNSVQALLAARAGAFIISPFVGRVDDTGVDGMALIREIAGIYRQDREITTKILAASIRHPRHIVEAALAGADIATCPFKVLQQAMRHPLTDRGIEQFLADWKSRMSS

SEQ ID NO: 12062 - protein, 297 aa, Triticum aestivum
  unsure (1)..(297): unsure at all Xaa locations
MKTFLVFALLALAAASAVAQISQQQQQPPFSQQQQPPFSQQQQSPFSQQQQQPPFLQQQQPPFSQXHQFHHQPQQQFPQTQQPQQPFPQPQQTFPQQPQLPFPQQPQQPFPQPQQPQQPFPQSQQPQQPFPQPQQQFPQPQQPQQSFPQQQQPAIQSFLQQQMNPCKNFLLQQCNHVSLVSSLVSIILPRSDCQVMQQQCCQQLAQIPQQLQCAAIHSVAHSIIMQQEQQQGVPILRPLFQLAQGLGIIQPQQPAQLEGIRSLVLKTLPTMCNVYVPPDCSTINIPYANIDAGIGGQ

SEQ ID NO: 12063 - protein, 316 aa, Buchnera aphidicola str. APS (Acyrthosiphon pisum)
MNQLSALKQFSIIVADTSDIKSICKYQPEDATTNPSLILQAVSSNTNQNFVDQAVQYAKKKGGLYKDQIINASDKILVDLGIEILKKIPGYISSEVDARLSFSTEASILKAKKIIDLYEEQGISRNRVLIKLAATWECIKAAEELKKDSILCNLTLLFSFAQARACAESNVFLISPFVGRIYDWYISQNLLSKSFLGKDPGVISVCKIYEYYKKYGYKTIIMGASFRNIQQILYLSGCDRLTISPVLLKELESNTAKIDRNLAPPSFISVPPVALSEEEFRWEHNQDAMAVQKLSDGIRNFGKDQLRLEKIFSKKI

SEQ ID NO: 12064 - protein, 158 aa, Azotobacter vinelandii
MRDPLFGIPLDDQPRTLADFPGRAWLVVNTASRCGFTPQYEGLQMLWQRYRERGLVVLGFPCDQFGHQEPGNELEIAEFCQLRYGVDFPLFQKVEVNGPRAHPLFVELKKRAPGLLGSQRVKWNFTKFLIGREGRVVRRFAPATGPRELCGEIEALLE

SEQ ID NO: 12065 - protein, 277 aa, Agrobacterium tumefaciens str. C58
MHNVTANGATIPALGFGTFRIPGSDVLRIVPHALKVGFRHVDTAQIYGNEAEVGEAIANSGVARGDIFLTTKVWVENYGHDAFIKSVDESLKKLKTDYVDLLLLHWPNEAVSLAEQIGALNEVKEAGKVRHIGVSNFNTELMAESVKLSRAPIVTNQIEYHPYLSQDVVIAAARKAGMSVTGYFGMADGKVFNDPVLRDIGARHGKSVAQVVLRWLVQQEGVIALSKTVGEARVLENFAIFDFALSADEMAAIHALAVPGGRIVSPDGLAPVWDKAA

SEQ ID NO: 12066 - protein, 500 aa, Oryza sativa (japonica cultivar-group)
MENSQMWLLWGALSVALFFYFSTLRRRYAGGKPLPPGPTPLPLIGNLHLVGGGTFHHKLRDLARVHGPVMTLKLGLATNVVISSREAAIEAYTKYDRHLAARATPDTFRACGFADRSMVFIPSSDPQWKALRGIHASHVFTPRVLAAVRPIRERKVGDLIAYLRAHAGEEVLVGHAMYTGILNMVSFSYFSVDIVDMGSQMARELREVVDDIILVVGKPNVSDFYPFLRPLDLQGLRRWTTKRFNRVFSIMGDIIDRRLAHIRDNKPRHDDFLDSILELMAAGKIDRVNVLNMLFEAFVAGADTMALTLEWVMAELLKNPSVMAKARAELRDVLGDKEIVEEADAARLPYLQAVLKEAMRLHPVGALLLPHFAMEDGVEVGGYAVPKGSTVLFNAWAIMRDAAAWERPDEFVPERFVERTPQLDFRGKDVEFMPFGSGRRLCPGLPLAERVVPFILASMLHTFEWELPGGMTAEELDVSEKFKTANVLAVPLKAVPVLIK

SEQ ID NO: 12067 - protein, 109 aa, Glycine max
  unsure (1)..(109): unsure at all Xaa locations
EIFGGYLYFHKAPNKEEFHIETYHKIKXLHQYNYLRANKSTFTXNLEAHIPFLDKAFINTTISINPKSKIIKRNKRRIKXXILKRAFNNKEHPYLPKHILYRQKKQFSN

SEQ ID NO: 12068 - protein, 493 aa, Glycine max
MEPNQLFSTHFRDGTIASCIEGQHRGAIPSVIVIGAGISGLAAARSLYDASFKVTVLESRDRLGGRIHTDFSFGCPVDMGASWLHGVCNENPLAPLIRGLGLSLYRTSGDNSVLYDHDLESYMLFNIDGKQVPQQMVIEVGDTFKKILEETGKVRDEHTEDISVSQAISIVLDKHPDLRQQGLAHEVLQWFICRMEAWFAADADMISLKTWDQEHVLSGGHGLMVQGYDPVIKVLAKDIDIRLNHRVKKISSGYNKVMVTVEDGRNFVADAAIITVPIGILKANLIEFEPKLPDWKVSAISDLGVGNENKIALRFDKVFWPNVELLGTVAPTSYTCGYFLNLHKATGHPVLVYMVAGRFAYDIEKLSDEAAANFVMQQLKKMFPNASKPVQYLVSRWGTDPNSLGCYSYDLVGKPTDVYDKLRAPLGNLFFGGEAVSLDNQGSVHGAYSAGVMAAENCESYLLEKLGHAEKLSLASVRHEMLETLIPLQISRM

SEQ ID NO: 12069 - protein, 443 aa, Sulfolobus tokodaii str. 7
MLKKFNLIFSKDTGVITLSELDKKAIEISSKYKGKIQILPKVPIKSIDDFAVLYTPGIAAVSKEIAKNKELSFHYTYRWNAIAIVTDGTRVLGLGDIGPEAAMPVMEGKALIFKYLGGVDAIPLPIGTKDPDKIIETVKILEPAFGGINLEDIESPKCFYILDKLRQTVEIPVWHDDQQGTAGATLAGLITSLEITGKDPKNIRVILYGAGAANIATARLLYKYGVPYENMIVIDSKGPLYKGRNDEDSMKLENPWKYELLEKTNKIGARTIEDAFKGADVLIAASKPGPGVIKSDWIKLMNKDPIVFALANPVPEIWPDEAKNAGARIVATGRSDLPNQVNNSLIFPAVFRGALDVRAKTITDEMVIEAARELASFAREKGINENYIIPKMTEWEVYPRVAAAVGMKAIQQGIARVSLSYDEIYSSAREIINSARKLLSSLT

SEQ ID NO: 12070 - protein, 379 aa, Arabis procurrens
MITTGQIIRCKAAVAWEAGKPLVMEEVEVAPPQKHEVRIKILFTSLCHTDVYFWEAKGQTPLFPRIFGHEAGGIVESIGEGVTDLAPGDHVLPIFTGECGDWPHCHSEESNMCDLLRINTERGGMIHDGESRFSINGKPIHHFVGTSTFSEYTVIHSGQVAKINPDAPLDKVCIVSCGLSTGLEAPLNVANPKKGQSVAIFGLGAVGLAAVEGARIAGASRIIGVDLNSKRFDEAKKFGVTEFVNPKDHDKLVQQVIAEMTNGGVDRSVECTGSVQAMIQAFECVHDGWGVAVLVGVPSKDDAFKTHPMNFLNERTLKGTFFGNYKPKTDIPGLVEKYMNKELEIEKFITHTVPFSEINKAFDYMMKGEGIRCIITMGA

SEQ ID NO: 12071 - protein, 199 aa, Staphylococcus epidermidis ATCC 12228
MSESNHITWHDSEVTKKQRQHKNGHKSAVIWFTGLSGSGKSTVSVALEKELFNEGKQTYRLDGDNVRHGLNKNLGFSPEDRSENIRRIGEVAKLMVDAGALTVTAFISPYKEDREGVRALLEDNEFIEVYTKCSVEECEKRDPKGLYKKARSGEIPEFTGISAPYQAPENPEITIDTEHDTIEQSVEQIIRYLKEHEYI

SEQ ID NO: 12072 - protein, 294 aa, Saccharomyces cerevisiae
MKTLVHVASVEKGRSYEDFQKVYNAIALKLREDDEYDNYIGYGPVLVRLAWHISGTWDKHDNTGGSYGGTYRFKKEFNDPSNAGLQNGFKFLEPIHKEFPWISSGDLFSLGGVTAVQEMQGPKIPWRCGRVDTPEDTTPDNGRLPDYDKDAGYVRTFFQRLNMNDREVVALMGAHALGKTHLKNSGYEGPWGAANNVFTNEFYLNLLNEDWKLEKNDANNEQWDSKSGYMMLPTDYSLIQDPKYLSIVKEYANDQDKFFKDFSKAFEKLLENGITFPKDAPSPFIFKTLEEQGL

SEQ ID NO: 12073 - protein, 167 aa, Triticum aestivum
MCPIKREMSGESGSPSPCSGENFCSPSASPERQQARQAGWTSAPAKRPAGRTKFRETRHPVYRGVRRRGNAGRWVCEVRVPGRRGSRLWLGTFDTAEAAARANDAVMLMLAAGGAACLNFADSAELLSVPVASSYRSLDEVRHAVVEAVEDLLRREALAEEDALSGT

SEQ ID NO: 12074 - protein, 473 aa, Ralstonia eutropha JMP134
MKTLDQFYIDGQWVDPAPGATAMDIINPATEAVAGKVALGTAADVDRAVAAARAAFPAWSQTSRETRIAMLERITALYKARMTDIAEAVRTEIGAPVALCNTLQAPIGLAHLAAATETLRKFEFETEYGNNYVRHEPIGVAALVTAWNWPLSLICAKTAAALAAGCTVVLKPSEIAPLDAAIFAEIMHEAGTPAGVFNMIYGEGKTVGARLSSHPDVDVISITGSTRAGVEVALSAAPTVKRVHQELGGKSPLLILDDADLQAAVTTGVTQVMMNSGQTCIAPTRMLVPRERYAEAVAVAAAVANAIPVGDPADAATKMGPISNRAQYEKVQRMIGAGIEEGARVAAGGTGRPDGLECGFFARPTVFADVNNGMAIAREEIFGPVLVMIPYDGEEDGIAIANDTPYGLAAYVASGDTARARRVAARLRAGSVRINGAQVDLAMPFGGYKASGNGRENGAYGLAEFFECKSVML

SEQ ID NO: 12075 - protein, 379 aa, Barbarea vulgaris
MITTGQIIRCKAAVAWEAGKPLVMEEVEVAPPQKHEVRIKILFTSLCHTDVYFWEAKGQTPLFPRIFGHEAGGIVESVGEGVTDLQPGDHVLPIFTGECGDCPHCHSEESNMCDLLRINTERGGMIHDGESRFSINGKPIHHFLGTSTFSEYTVVHSGQVAKINPEAPLDKVCIVSCGLSTGLGATLTVAKPKKGQSVAVFGLGAVGLGAAEGAKMAGASRIIGVDLNPKRFEEAKKFGVTEFVNPREHDKPVQQVIADMTNGGVDRSVECTGSVQAMIQAFECVHDGWGVAVLVGVPSKDDAFKTHPMNFLNERTLKGTFFGNYKPKTDIPGVVEMYMNKELELEKFITHTVPFSEINKAFDYMLKGESIRCIITMGA

SEQ ID NO: 12076 - protein, 209 aa, Arabidopsis thaliana
MNNDDIILAEMRPKKRAGRRVFKETRHPVYRGIRRRNGDKWVCEVREPTHQRRIWLGTYPTADMAARAHDVAVLALRGRSACLNFADSAWRLPVPESNDPDVIRRVAAEAAEMFRPVDLESGITVLPCAGDDVDLGFGSGSGSGSGSEERNSSSYGFGDYEEVSTTMMRLAEGPLMSPPRSYMEDMTPTNVYTEEEMCYEDMSLWSYRY

SEQ ID NO: 12077 - protein, 475 aa, Synechococcus elongatus PCC 6301
MYEKIQPPSEGSKIRFEAGKPIVPDNPIIPFIRGDGAGVDIWPATERVLDAAVAKAYGGQRKITWFKVYAGDEACDLYGTYQYLPEDTLTAIREYGVAIKGPLTTPIGGGIRSLNVALRQIFDLYACVRPCRYYTGTPSPHRTPEQLDVVVYRENTEDIYLGIEWKQGDPTGDRLIKLLNEDFIPNSPSLGKKQIRLDSGIGIKPISKTGSQRLIRRAIEHALRLEGRKRHVTLVHKGNIMKFTEGAFRDWGYELATTEFRTDCVTERESWILANQESKPDLSLEDNARLIEPGYDAMTPEKQAAVVAEVKAVLDSIGATHGNGQWKSKVLVDDRIADSIFQQIQTRPGEYSVLATMNLNGDYISDAAAAVVGGLGMAPGANIGDEAAIFEATHGAAPKHAGLDRINPGSVILSGVMMLEYLGWQEAADLITKGISQAIANREVTYDLARLMEPAVDQPLKCSEFAEAIVKHFDD

SEQ ID NO: 12078 - protein, 416 aa, Escherichia coli
MESKVVVPAQGKKITLQNGKLNVPENPIIPYIEGDGIGVDVTPAMLKVVDAAVEKAYKGERKISWMEIYTGEKSTQVYGQDVWLPAETLDLIREYRVAIKGPLTTPVGGGIRSLNVALRQELDLYICLRPVRYYQGTPSPVKHPELTDMVIFRENSEDIYAGIEWKADSADAEKVIKFLREEMGVKKIRFPEHCGIGIKPMSEEGTKRLVRAAIEYAIANDRDSVTLVHKGNIMKFTEGAFKDWGYQLAREEFGGELIDGGPWLKVKNPNTGKEIVIKDVIADAFLQQILLRPAEYDVIACMNLNGDYISDALAAQVGGIGIAPGANIGDEYALFEATHGTAPDIAGQDKANPGSIILSAEMMLRHMGWTEAADLIVKGMEGAINAKTVTKDFESLMDGAKLLKCSEFGDAIIENM

SEQ ID NO: 12079 - protein, 330 aa, Bartonella taylorii
STASCESKITYIDGNKGILLYRGYPIDQLAEKGDFLESCYLLLYGELPTKQEKHDFDRCIMQHTMVHEQFARFFHGFRRDSHPMAVMVACLGAMSAFYHDSIDITDPQQRMIASVRLISKVPTLAAMAYKYSIGQAFVYPRNDLSYAANFLRMCFCVPCEEYKINPVLTRAMDRIFILHADHEQNASTSTVRLAGSSGANPFACIAAGVACLWGPAHGGANEACLKMLQEIGSVERIPEFIARAKDKNDPFRLMGFGHRVYKNYDPRAKIMQKTCHEVLKELNIQGDPLLDIAMELEKIALNDEYFVEKKLYPNVDFYSGITLKALGFPT

SEQ ID NO: 12080 - protein, 330 aa, Bartonella taylorii
STASCESKITYIDGNKGILLYRGYPIDQLAERGDFLESCYLLLYGELPTQQEKHDFDRCIMQHTMVHEQFARFFHGFRRDSHPMAVMVACLGAMSAFYHDSIDITDPQQRMIASVRLISKVPTLAAMAYKYSIGQAFVYPRNDLSYAANFLRMCFCVPCEEYKINPVLTRAMDRIFILHADHEQNASTSTVRLAGSSGANPFACIAAGVACLWGPAHGGANEACLKMLQEIGSVERIPEFIARAKDKNDPFRLMGFGHRVYKNYDPRAKIMQKTCHEVLKELNIQGDPLLDIAMELEKIALNDEYFVEKKLYPNVDFYSGITLKALGFPT

SEQ ID NO: 12081 - protein, 262 aa, Glycine max
MVSISDHELVLIFGLLGNIVSFMVFLAPLPTFYTIYKKKSSEGFQSIPYAVALLSALLLLYYGFIKTNATLIITINCIGCVIEVSYLAMYIIYAPRKQKISTLVMILIADIGGFGLTMLITTFAVKGINRVHAVGWICAIFNIAVFAAPLSIMRRVIKTKSVEFMPFSLSLFLTLCATMWFFYGFFDKDNFIMLPNVLGFLFGISQMILYMIYKNAKKNGEINCTEQQERDGTVNSKQHSCNGNKLDFPSLVEMKENQLNQV

SEQ ID NO: 12082 - protein, 330 aa, Bartonella grahamii
STASCESKITYIDGDKGILLYRGYPIDQLAEKGDFLESCYLLLYGELPTQQEKNEFDRCIMQHTMVHEQFARFFHGFRRDSHPMAVMVACLGAMSAFYHDSIDITDPHQRMIASVRLISKVPTLAAMAYKYSIGQAFVYPRNDLSYAANFLHMCFAVPCEEYKTNPVLARAMDQIFTLHADHEQNASTSTVRLAGSSGANPFACIAAGVACLWGPAHGGANEACLKMLQEIGSIKRIPEFIARAKDKNDSFRLMGFGHRVYKNYDPRAKIMQKTCHKVLKELNIQDDPLLDIAIELERIALSDEYFIEKKLYPNVDFYSGITLKALGFPT

SEQ ID NO: 12083 - protein, 330 aa, Bartonella grahamii
STASCESKITYIDGDKGILLYRGYPIDQLAEKGDFLESCYLLLYGELPTQQEKNEFDRCIMQHTMVHEQFARFFHGFRRDSHPMAVMVACLGAMSAFYHDSIDITDPHQRMIASVRLISKVPTLAAMAYKYSIGQAFVYPRNDLSYAANFLHMCFAVPCEEYKTNPVLARAMDQIFTLHADHEQNASTSTVRLAGSSGANPFACIAAGVACLWGPAHGGANEACLKMLQEIGSIKRIPEFIARAKDKNDPFRLMGFGHRVYKNYDPRAKIMQKTCHEVLKELNIQDDPLLDIAIELEKIALSDEYFIEKKLYPNVDFYSGITLKALGFPT

SEQ ID NO: 12084 - protein, 96 aa, Glycine max
  unsure (1)..(96): unsure at all Xaa locations
DSSMISYPADTTDNPAXAEMTAPFTDLNALHVLPTIKTNNELTSIASNPGKLLCMQVCTPLVNKKFETLSYLPDLDDATFEDEPEYLLMNGWIPCL

SEQ ID NO: 12085 - protein, 330 aa, Bartonella grahamii
STASCESKITYIDGDKGILLYRGYPIDQLAEKGDFLESCYLLLYGELPTQQEKNEFDRCIMQHTMVHEQFARFFHGFRRDSHPMAVMVACLGAMSAFYHDSIDITDPHQRMIASVRLISKVPTLAAMSYKYSIGQAFVYPRNDLSYAANFLHMCFAVPCEEYKTNPVLARAMDQIFTLHADHEQNASTSTVRLAGSSGANPFACIAAGVACLWGPAHGGANEACLKMLQEIGSIKRIPEFIARAKDKNDPFRLMGFGHRVYKNYDPRAKIMQKTCHEVLKELNIQDDPLLDIAIELEKIALSDEYFIEKKLYPNVDFYSGITLKALGFPT

SEQ ID NO: 12086 - protein, 487 aa, Bacillus sp. KSM-K16
MAIKTEVVFGNYINGRWKQEAASPLASINPSDAEEVVGYVQNSTADVVDEAVEVAKGALLSWRKLTGAERGHYLYQAANQLESRLDEIAETLAREMGKTLPEAKGETARGVAILRYYAGEGLRADGEVIPSTDSEALMFTKRVPLGVVGVITPWNFPIAIPVWKIAPALIYGNTVVFKPATEAAVTAAKVVECFAQAGLPKGVLNLVTGSGKVIGNALVAHEHVHGLTFTGSEQTGKQIGKAAAARGAKYQLEMGGKNPVIVAEDADLHVAVDATISGAFRSTGQKCTATSRVIVAEAILQDFQELLLEKTKQITIGKALDDGVWMGPCASEAQLRTVLDYIEIGKKEGAKLLCGGKRVTDGNRAAGYFVEPTIFTNVNRHMRIAQEEIFGPVIALITAKNMEEAIEIANDSRYGLSASIFTTNIEKMLLFIDEMDAGLVRVNAESAGVELQAPFGGMKASSSHSREQGQAAKEFYTSIKTVFVKGR

SEQ ID NO: 12087 - protein, 447 aa, Chlorobium limicola
MADPNHRNSLTITDNRTGKSYELPIENGTVRTMDLRQIKASEDDFGLLGYDPAFLNTCSCKSQITFIDGEKGILRYRGYPIEQLAEKSSFLETAYLLIKGELPDKERLAVWTYNIRHHTMTHANLTKFMDGFRYDAHPMGILVGTVGALSTFYPDAKQVSEEESRKLQVRRLIGKIPTLAAMSFRHSLGFPYVLPDNDLSYAGNFLSMMFRMTEQKYEPNPVLEKALDVLFILHADHEQNCSTNAVRSVSSSMVDPYSAIAAGCAALYGPLHGGANEAVIRMLEGIGSVDNIPAFIKSVKSGEGRLMGFGHRVYKNYDPRARIIKKIAFEVFEETGRNPLLDIAIELERIALEDDYFVGRKLYPNVDFYSGLIYQAMGFPTDMFPVLFAIGRTPGWLAQWIEHVKDPEQRIARPRQIFLGAPCRDYVPLDERPSRGDDEEKFGICRL

SEQ ID NO: 12088 - protein, 144 aa, Zea mays
MAMAYKMATEGMDVKEECQRWFMEMKWKKVHRFVVYRIDERSRAVLVDRVGGPGEGYEELVAALPGDDCRYAVFDFDFVSVDNCQKSKIFFIAWSPAASRIRAKILYATSKQGLRRLLDGVHYEVQATDPSEMGFDETVLPIDY

SEQ ID NO: 12089 - protein, 125 aa, Thermus thermophilus
MALDIERIKEELSQATVLELKQLIDALKEAWGVTAAAPVAVAAAPAAGAAAAPAEEKTEFDVILKEAGAKKLEVIKDVRAITGLGLKEAKDLAEKGGPVKEGVSKQEAEEIKKKLEAVGAVVELK

SEQ ID NO: 12090 - protein, 120 aa, Gossypium hirsutum
MASSMSLKPACVAVLCMVVGAPLAQGAVTCGQVTSSLAPCIGYLTGNGAGGVPPGCCGGIKSLNSAAQTTPDRQAACKCIKSAAAGISGINYGIASGLPGKCGVNIPYKISPSTDCNSVK

SEQ ID NO: 12091 - protein, 161 aa, Lilium sp.
FLRSISMGSKLTREEYNTLLAAFHKLMVRLEVASVPKDATPADIKNLPDAYLYFIDMPGVRTGEIKVEVEDDSDLVISGGRKREEEEKYQIMERWTGRRMRKFELPKNADTKAVSAVWKNGVLAVTVGKLLAWEVAGLFFNIERLPVPLPTKTKSIEVKIA

SEQ ID NO: 12092 - protein, 226 aa, Triticum aestivum
  unsure (1)..(226): unsure at all Xaa locations
SGRGKALHQYDCLRANKATSAWGLEARVPFLDKDFINEAMSIDPEWKMVRPDLGRIEKWVLRKAFDDEEQPFLPKHILYRQKEQFSDGVGYSWIDGLQAHAASNVADKXCLSNAKFIFPHNTPTTKEAYYYRMIFERFFPTEXAILTVPGGPSVACSTAKAIEWDAQWSENLDPSGRAALGVHLAAYEHEQDPKHVPDTIAAGGSKKPRTIRVAAAPPPPGVAIEG

SEQ ID NO: 12093 - protein, 483 aa, Arabidopsis thaliana
MVITANDLSKWENFPKGLKVLLLLNGCDSDGDGSSAAETRSELESMDYIVTTFTDETEALSAVVKNPESFHIAIVEVNMSAESESFKFLEAAKDVLPTIMISTDHCITTTMKCIALGAVEFLQKPLSPEKLKNIWQHVVHKAFNDGGSNVSISLKPVKESVVSMLHLETDMTIEEKDPAPSTPQLKQDSRLLDGDCQENINFSMENVNSSTEKDNMEDHQDIGESKSVDTTNRKLDDDKVVVKEERGDSEKEEEGETGDLISEKTDSVDIHKKEDETKPINKSSGIKNVSGNKTSRKKVDWTPELHKKFVQAVEQLGVDQAIPSRILELMKVGTLTRHNVASHLQHRKNILPKDDHNHRWIQSRENHRPNQRNYNVFQQQHRPVMAYPVWGLPGVYPPGAIPPLWPPPLQSIGQPPPWHWKPPYPTVSGNAWGCPVGPPVTGSYITPSNTTAGGFQYPNGAETGFKIMPASQPVSVNNSLFSF

SEQ ID NO: 12094 - protein, 224 aa, Lactococcus lactis subsp. lactis Il1403
MDNLKKQVGIKAAEFVKSGMVVGLGTGSTAAYFVEELGRRIAEEQLEITGVTTSNVTSSQARALGIPLASIDEVDYVDLTVDGADEIDSSLNGIKGGGAALLMEKIVATYSKDYIWIVDESKLSENLGSFKIPVEVIPYGSQQVFKKFEAAGYAPTWRLNEENERLITDMHHFIIDLHISQIKEPEKLAEELDLMGGVVEHGLFNNMVKKVIVAGNEGVRIINK

SEQ ID NO: 12095 - protein, 279 aa, Zea mays
MATPAAEKPEDVEIREVWADNLETEFAVIRDIVDDYPYVAMDTEFPGVVCRPLGTYKSAAEFNYATLKANVDMLKLIQLGLTLSDEHGGLPALGPDGRPCVWQFNFRGFDPRTDVAAADSIDLLRRSGIDFSRHAADGVDSRCFAELLMSSGVVLNSDVHWVTFHSGYDFGYLLKLLTGTNLPDTLPGFFDLIKIYFPVIYDIKHLMRFSNSLHGGLNKLAELLDVARVGICHQAGSDSLLTALSFKKLKEAYFNGLTEKYAGVLYGLGFEGVETTSAH

SEQ ID NO: 12096 - protein, 499 aa, Candida tropicalis
MAISSLLSWDVICVVFICVCVYFGYEYCYTKYLMHKHGAREIENVINDGFFGFRLPLLLMRASNEGRLIEFSVKRFESAPHPQNKTLVNRALSVPVILTKDPVNIKAMLSTQFDDFSLGLRLHQFAPLLGKGIFTLDGPEWKQSRSMLRPQFAKDRVSHISDLEPHFVLLRKHIDGHNGDYFDIQELYFRFSMDVATGFLFGESVGSLKDEDARFSEAFNESQKYLATRATLHELYFLCDGFRFRQYNKVVRKFCSQCVHKALDVAPEDTSEYVFLRELVKHTRDPVVLQDQALNVLLAGRDTTASLLSFATFELARNDHMWRKLREEVISTMGPSSDEITVAGLKSCRYLKAILNETLRLYPSVPRNARFATRNTTLPRGGGPDGSFPILIRKGQPVGYFICATHLNEKVYGNDSHVFRPERWAALEGKSLGWSYLPFNGGPRSCLGQQFAILEASYVLARLTQCYTTIQLRTTEYPPKKLVHLTMSLLNGVYIRTRT

SEQ ID NO: 12097 - protein, 309 aa, Glycine max
MSLIAEAPNFLKLYSDGSVKRFDPEIVPASLESTKGYKSKDVIIDSSKPITGRIFLPDYPTSSKKLPLLVYFHGGGFCIGSTTWLGYHNFLGDFSVTSQSIILSVDYRLAPEHRLPIAYEDCYTSLEWLGDQVSCEPLLQQIDLTRVFLSGDSAGGNIAHHVAVKAIQNNECPLKIKGLMLIHPYFGSEKRTKNEMADESIKDVAMNDMFWRLSIPEGLNRDYFGCNFEKTDLSTSVWSKFPAIGVYVAGKDFLKERGVRYAEFLKKKGVKEVELVEAKEETHVFHVYYPESCATRLLQNQMSLFMEKY

SEQ ID NO: 12098 - protein, 154 aa, Brassica napus
  unsure (1)..(154): unsure at all Xaa locations
MAAALASRISRGGRSLLGGLKNDFSGSMTSSTGMMNGSILLPQQQQQRRTFIQMGTVLKVVDNSGAKKVMCIQALKGKKGARLGDTIVASVKEAMPNGKVKKGAVVYGVVVRAAMQRGRVDGSEVRFDDNAVVLGDNKDKKTXTDRQPIXTRVF

SEQ ID NO: 12099 - protein, 220 aa, Zea mays
MCGILAVLGCSDCSQARRARILACSRRQAPVHCTGTELFSYRNHKESNGRETRMGRSEKEHGNLTRSSNPVLKHRGPDWSGLYQHEGNFLAQQRLAIVSPLSGDQPLFNEDRTVVVVANGEIYNHKNVRKQFTGAHSFSTGSDCEVIIPLYEKYGENFVDMLDGVFAFVLYDTRDRTYVAARDAIGVNPLYIGWGSDGQTQTQRGVAFSQCGRAKQSTPA

SEQ ID NO: 12100 - protein, 352 aa, Triticum aestivum
  unsure (1)..(352): unsure at all Xaa locations
GRLKEDAARKYFQQLICAVDFCHXSRGVYHRDLKPENLLLDENSNLKGAAAGAGTISECRRLDGLLHTSCGTPAYVAPEVINRKGYDGAKADIWSCGVILFVLLAGYLPFQDKNLMNMYKXRLGKAEFKCPSWFPSDIRRVLAKGFLDPXNPSTRISIERIMEHPWFRKGLDAKPRGRNLQAKDAGPAADMTATSDPLSCSNSATEGKEQEAKKLSNLNAFDIISLSTGLDLSGMFEDNDKKRESKFTSTNSASTIVSKIEDIAKCMRLKLVKKDGGMMRMESFKPGRKGVMSIDAEIFEVTPDFHLVELKKTNGDTIEYQKVLNQEMRPALKDIVWAWQGEQQPPPPPQSC

SEQ ID NO: 12101 - protein, 503 aa, Muscari armeniacum
MSFTDHHYLLLILFLIPILVYTIRRKISSTKSKLPPCPPKLPLIGNLHQMGTLPHQSLHALSVKYGPLMLLKLGQIPTLIVSSADMAREIMKTHDHIFASRPSLMTAGIILYGSMDVVFAPYGEHWRQMRKLCVNHLLSPKAVQSFRRMHEEEVATMVAKISEVSSSSGVVNMSETLNLFASNAMLKAISRKLFRDERRSRVICELNEETAAILGQFSVSDFMPLLAWFDMVFGVGARAKKTARLWDRVLHEIIEDCRNRRDSEVNTDFVNVLLALLEDNDMDFSLNKDIIKAVLQDMIAAGTETSSTAMDWCMAELVRNPEAMKKLQDEVRGIANTKPMITDDDLSKMGYLKAVIKELLRLHPPVPLLIPRESMDHCEVQGFDIPKQTRVIVNAWSIGRDPNVWEAPEEFRPERFLDCAINFRGHDFELIPFGAGRRICPGMQFAVSTLELALANLVRSFDWELPDGMNNEDLGMGDGPGLSARRRQSLLLVAKPFLGLKCM

SEQ ID NO: 12102 - protein, 512 aa, Candida tropicalis
MLDQILHYWYIVLPLLAIINQIVAHVRTNYLMKKLGAKPFTHVQRDGWLGFKFGREFLKAKSAGRSVDLIISRFHDNEDTFSSYAFGNHVVFTRDPENIKALLATQFGDFSLGSRVKFFKPLLGYGIFTLDAEGWKHSRAMLRPQFAREQVAHVTSLEPHFQLLKKHILKHKGEYFDIQELFFRFTVDSATEFLFGESVHSLKDEEIGYDTKDMSEERRRFADAFNKSQVYVATRVALQNLYWLVNNKEFKECNDIVHKFTNYYVQKALDATPEELEKQGGYVFLYELVKQTRDPKVLRDQSLNILLAGRDTTAGLLSFAVFELARNPHIWAKLREEIEQQFGLGEDSRVEEITFESLKRCEYLKAVLNETLRLHPSVPRNARFAIKDTTLPRGGGPNGKDPILIRKDEVVQYSISATQTNPAYYGADAADFRPERWFEPSTRNLGWAFLPFNGGPRICLGQQFALTEAGYVLVRLVQEFPNLSQDPETKYPPPRLAHLTMCLFDGAHVKMS

SEQ ID NO: 12103 - protein, 319 aa, Lactobacillus johnsonii NCC 533
MKRIGILTSGGDAPGMNAAIRAVTRTALANGIEVCGIRYGYAGLVAGDIFQMTSETVADKISRGGTFLYSARFPEFKEEEVQLKGIEQLKKHGIDALVVIGGDGSYHGALKLTRHGYNAIGLPGSIDNDIPYTDYTIGFDTACNTAMEAIDKIRDTATSHQRVFVVNVMGRDCGDIAMHVGVATGADAIVIPEEPYDIKEIAENLKQGFANGKKHGIVVLAEGVMDAEKFKDELLKYGDFDARANVLGHMQRGGSPTMRDRVVASEMGAYAVKLLLEGKGGLAVGMENNKLTHHDILDLFDAKHHGNYALYSLNKDLAK

SEQ ID NO: 12104 - protein, 480 aa, Bacillus subtilis
MHPRFFLIHSFPLTHKLEKLEYERKRCGSVEKTKLTGRIVTRDDPDYNEARTNINLSLERYPDIIVFCQNKQDALNALKWARENRVPFRIRGGRHSYENFSLLNNGLVIDLSEMKKITVNQDKKLAYIEAGAELGEVYRTLWQYGLTLPAGTIANVGLTGLTLGGGIGLLTRAAGLTCDSLVQLEMIVADEKEGADLITVSCSNHPDLFWASQGGGGGNFGIVTSMTFKAVPISQVSIFSITWGWDDFEEVYNTWQNWPPYTDDRLTSSIEFWPKEVNRIEALGQFVGPKTELKKLLKPLLKAGSPTSGMVKTTPFIEAVTFFNSPGGNQPQKMKRSGSFIEKPLSERAISTIKHFLEHAPNQNASVWQQALGGAAGRVAPDQTAFYYRDAIIAQEYLTNWTSPGEKRQNVRWIEGLRTSLSKETMGDYVNWPDIEIRNWPRTYYGENVERLRRVKTTYDPENVFRFEQSIPPLRRSLFF

SEQ ID NO: 12105 - protein, 260 aa, Triticum aestivum
  unsure (1)..(260): unsure at all Xaa locations
MLRENTMASLVFLVALLLSCSSMSSAARYLEEAVPKKEYPPHLIVPELPKPELPPHPVVPELPKPEPPHPLVPEVPHPVVPKSPKEPEVPHPVVPEVPKHELPPHPAMPELPKPELPHPAVPEVPKEPEVPHPVVPEVPKEHELPHPVVPEVPKEPEVPHPVVPEVTXEPKVPHPVVPGVPKEHELPHPAMPELPKPEMPHHAVPEVPKEPHVSHPEVPKEPELPHPAVPEVPKHEMPPFPKAELPPKPEFHFPEPEAKP

SEQ ID NO: 12106 - protein, 75 aa, Triticum aestivum
  unsure (1)..(75): unsure at all Xaa locations
MSEGTANCVDILIAIILPPLGVFLKVRGAARFWXXLLLTFLXYTPGIIYAIYAIHQRTPTHPPDDIHSLYRVSYA

SEQ ID NO: 12107 - protein, 307 aa, Glycine max
MSRALEHDYIGLAENPSMDGKNSSSLNLKETELRLGLPGCESPERKSGSALCLFGKELQNNNNNVCSLKAGAKRGFSDAIDTSSVTEGSQGASALFSPRGGNVGKPLIGLDTQTNTTIKEVGAVPQSAKPVQENNDQFAATNAHAIAPAAKAQVVGWPPIRSFRKNTMASNLTKNNDEAEGKSGFGCLYVKVSMDGAPYLRKVDLKTYNNYMELSSALEKMFSCFTIGQCNSPGLPGKDGLSESSLRDLLHGSEYVLTYEDKDGDWMLVGDVPWEMFTDSCRRLRIMKGSEAIGLAPRAMEKSRSQN

SEQ ID NO: 12108 - protein, 136 aa, Zea mays
  unsure (1)..(136): unsure at all Xaa locations
MTRVIHDSGDGMQKEALDLVSSDVNFPKGCFPDYRIGPNNQIIDPEETHEAVPLKEVVAKETAQLVEQHRRLSVRDLKEKFEKGLSSASKLSEEAKRREAASLDRQVLLKKLRDVLDTLXRSCGWSNKDDAEEAIS

SEQ ID NO: 12109 - protein, 364 aa, Pichia anomala
MSEKTIVVLPGDHVGTEITNEAIKVLKAIEEVRPNVKFNFQHHLIGGAAIDATGVPLPDEALEAAKKADAVLLGAVGGPKWGTGAVRPEQGLLKIRKELNLYANLRPCNFASESLLELSPIKAEFAKGTDFTVVRELVGGIYFGERKEDDGSGVASDTETYSVPEVQRITRMAAFMALQHNPPLPIWSLDKANVLASSRLWRKTVTETIEKEFPQLTVQHQLIDSAAMILIKSPTTLNGIVITSNMFGDIISDEASVIPGSLGLLPSASLASLPDTNKAFGLYEPCHGSAPDLPANKVNPIATILSAAMMLKLSLDLFEEGVALEKAVKEVLDAGVRTGDLRGSNSTKEVGDAAVEAAKRILKN

SEQ ID NO: 12110 - protein, 144 aa, Arabidopsis thaliana
MTNVRLPILVSSVLFLVFISSSLLFPTPSFAARVSHSLVQEEVKKVPEYTEPEEPEVPEEPELPSPEEPEIPEEPEIPEEPEVPGEPEVPEEPEEPEEPAGSTFEFPSWFPSFPIPGVNGGLPKTEKTKPTSTVEEVNVSNKKP

SEQ ID NO: 12111 - protein, 314 aa, Thermus thermophilus
MDYGMYFFEHVTPYETLVRRMERVIASGKTPFQDYFLFESKGFGKVLILDKDVQSTERDEYIYHETLVHPAMLTHPEPKRVLIVGGGEGATLREVLKHPTVEKAVMVDIDGELVEVAKRHMPEWHQGAFDDPRAVLVIDDARAYLERTEERYDVVIIDLTDPVGEDNPARLLYTVEFYRLVKAHLNPGGVMGMQTGMILLTHHRVHPVVHRTVREAFRYVRSYKNHIPGFFLNFGFLLASDAFDPAAFSEGVIEARIRERNLALRHLTAPYLEAMFVLPKDLLEALEKETMVSTDQNPFYVTPEGEARQAPYKG

SEQ ID NO: 12112 - protein, 115 aa, Zea mays
HVDYACTPEEVQQHFNSCGTVNRVTILTDKFGQPKGFAYVEFVEVEAVQEAIKLNESELHGRQLKVAPKRTNVPGMKQPRGRGFNPYRPYGYSPYGYGYGYGRFPRFRRPRRPYF

SEQ ID NO: 12113 - protein, 499 aa, Oryza sativa (japonica cultivar-group)
MENSQVWLLWGALSVAVLFYLSTLRRRYAGGKPLPPGPTPLPLIGNLHLAGGTFHHKLRDLARVHGPVMTLKLGLATNVVISSREAAIEAYTKYDRHLAARATPDTFRACGFADRSMVFIPSSDPQWKALRGIQGSHVFTPRGLAAVRPIRERKVGDLIAYLRAHAGEEVLLGQAMYTGLLNLVSFSYFSIDIVDMGSQMARDLREVVDDIISVVGKPNISDFYPFLRPLDLQGLRRWTTKRFNRVFSIMGDIIDRRLAHIRDGKPRHDDFLDSLLELMATGKMERVNVVNMLFEAFVAGVDTMALTLEWVMAELLHNPAIMARVRAELSDVLGGKEAVEEADAARLPYLQAVLKEAMRLHPVGALLLPHFAAEDGVEIGGYAVPRGSTVLFNAWAIMRDPAAWERPDEFVPERFLGRSPPLDFRGKDVEFMPFGSGRRLCPGLPLAERVVPFILASMLHTFEWKLPGGMTAEDVDVSEKFKSANVLAVPLKAVPVLIK

SEQ ID NO: 12114 - protein, 195 aa, Rhodospirillum rubrum
MEQASKGSGGGDWLIRGVFSLGLALASFGGPASAQAAGAHDYSFPAIDGGTLPLAAWAGHPVLVVNTASECGFTAQYEGLEALWKAYRAKGLIVLGVPSNDFGGQEPGSAAEIKDFCESTFAVDFPLTDKTAVSGARAHPFYAWAKASRPDLSAPRWNFHKYLIAPDGSLAASFSALTDPKDRDLTDAIDKLLEK

SEQ ID NO: 12115 - protein, 175 aa, Oryza sativa (japonica cultivar-group)
MELSVVGGEPLLAVAMQQLLDLDLPDELERQLNPPTRAYVRDRRAMANTPMDVKELRASGALVLAVDMPGVAPADVRVEVEDGNVLAISGERRRPAGDGDDGGEGVKYLRMERRMGKFMRRFPLPESADLDGVRAEYKDGVLTVTVDKKPPPEPKKPRVVEVKVAGAGEPKGKGK

SEQ ID NO: 12116 - protein, 336 aa, Zea mays
  unsure (1)..(336): unsure at all Xaa locations
IGYLEAGRERLTGGNAWVVVVALQVRWIRALYSNFSEFTADQERLISLGSGGGGGRRFDYVEGFVVAAQGLINNWRSSFFSPQNPVKLTSLKHHSGVLYCLEVTKNYDDETAGSVDQDVDTLLGELNFLPGTVFTTDLPYVDFLDRVHKAELKLRAKGMWEVPHPWLNLFVPASRIADFDRGVFRGVLGGRTRXAGGPVLIYPMNKHKWDPRSSAVTPDEEVFYLVAFLRSALPGAAGEAWRALARQNQRILDFCAGAGIGAKQYLPGHKXARHEWAEHFGAXRGWDRFARLKXAEFDPRAILAAGQGIFRAARLAGARRPTRNVIQLLILIIRRV

SEQ ID NO: 12117 - protein, 498 aa, Triticum aestivum
KKNILIEKLHIDISPSLAPWRLVPVSGIENICSSSIDNLGLESSKDEESSNALLSRAWSPGWRNAEKTLEDFVSHGLLDYSKDRMKVAGTTTSLLSPYLHYGEVSVRKIYQLVRVQQIKWENEGKSGAGESVNLFLLSIGLREYSRYLCFNFPFTHERSLLGNLKHYPWRADEDRFKSWRQGMTGYPLVDAGMRELWATGWTHNRIRVIVSSFAVKFLQIPWTWGMKYFWDVLLDADIESDILGWQYISGSLPDGHELGRLDNPEVQGQKYDPDGEYVRTWIPELARMPGEWIHHPWDAPSSILEVAGVELGFNYPMPIVELHTARECLDDAISTMWQLDTAEKLAELDGEVVEDNLSHIKSFDVPKVVLKELSPHCDREVPTDDGRNLELQPKELKGTNKQTICVDVIKASKMEDTGSIANSPISRKRSSSGSVFNVPSYSSSVEVHSQNQHPGGYLVGSSKYILQKAERNCVGKAEDDDSADSGTNTSRASKRPAA

SEQ ID NO: 12118 - protein, 488 aa, Rubrobacter xylanophilus DSM 9941
MTTAAERVRVAGVEVSPDHFIGGERVASPRRFEDISPITNEPIAEVSRAGEAEVDAAVRAARDAFPGWAALGPAGRAPYLHRLADLIDANVERLAAVECMDMAMLLRSLRARVIRRGARNYRAYADLAASYEERDWRSQGTWNRVQRMPAGPAAIITPWNAPFMLSTWKTAPALAAGCTVVLKPAEWSPLSCSLLADLVAEAGFPPGVFNVVQGIGEEAGAALVAHPLLRRVSFTGSPETGRSIGVAAAKNLVPFTAELGGKGPLIVFEDADLDAAARRAAGQYDDAGQVCLAGTRLLVQESVAEEFLELFHRYADEHVLGDPRSEHTTVSPLIHPDHLRRVEGFVERARREGHRVLRGGRRSPAGPLFYQPTLIEPLSNDAEIVQREVFGPVLTLQTFADEEEAVSLANSTEYGLSGIVYTSSMGRADRVGRAVRAGVVWVNTFLVRDLTAPFGGMGISGIGREGGDYALDFYSDLKTLQILEGSTR

SEQ ID NO: 12119 - protein, 512 aa, Candida tropicalis
MLDQIFHYWYIVLPLLVIIKQIVAHARTNYLMKKLGAKPFTHVQLDGWFGFKFGREFLKAKSAGRQVDLIISRFHDNEDTFSSYAFGNHVVFTRDPENIKALLATQFGDFSLGSRVKFFKPLLGYGIFTLDGEGWKHSRAMLRPQFAREQVAHVTSLEPHFQLLKKHILKHKGEYFDIQELFFRFTVDSATEFLFGESVHSLRDEEIGYDTKDMAEERRKFADAFNKSQVYLSTRVALQTLYWLVNNKEFKECNDIVHKFTNYYVQKALDATPEELEKQGGYVFLYELAKQTKDPNVLRDQSLNILLAGRDTTAGLLSFAVFELARNPHIWAKLREEIESHFGSGEDSRVEEITFESLKRCEYLKAVLNETLRLHPSVPRNARFAIKDTTLPRGGGPNGKDPILIRKNEVVQYSISATQTNPAYYGADAADFRPERWFEPSTRNLGWAYLPFNGGPRICLGQQFALTEAGYVLVRLVQEFPSLSQDPETEYPPPRLAHLTMCLFDGAYVKMQ

SEQ ID NO: 12120 - protein, 170 aa, Pasteurella multocida subsp. multocida str. Pm70
MKEEVMKVTSSAIKNGAFEDKYGKRGKQFSPNGMPTYSIPFDISEVPVGTKSFAVVLEDKDAITASGFVWIHWLIANLERTSVQENESLTATDYVQGANSWASVLGKFDIAEASFYGGMAPPNSLHRYELIVYALDCKLDLSAGFRFNDLHFAMQGHILDQAVIMGTYDV

SEQ ID NO: 12121 - protein, 469 aa, Methanosarcina acetivorans C2A
MLKNVQKLGKFLIIICMIFIALSSPAFAATAEENAVAIEGVQTALTFVWLLLASGLVFFMHAGFSLVETGLTRSKNTANILMKNFMTIVLGILIYWAVGWGVMYGADAAGLIGTDQFFLSGADNALWNGWFFQMVFAATGATIVSGAMAERTNFKAYLIYCIMMVAVIYPVYGHWVWSGADLALLTGADSPIVQAIGVPSHDFAGSGVVHSIGGYSALAGVLLVGARIGKFKDGKAVPIPGHNLTIAFLGTLILALGWIGFNGGSTLDGNDPYMNLVVVNTFLAAAAGAVVTMLITWMKTGKPDPSLTANGLLGGLVAITAPCGSVNNWAAIIIGAIAGIIIYAGVMFNENTLKVDDPVGAIAVHGYCGSWGLISVGLFSIGIGNGILADAAYAAEVPGLFYGGGISLLLIQLISVLCSIVWAFGISFIIFKILDAVVGLRVSEEEEIMGLDICEHGIRAYPEYLMREE

SEQ ID NO: 12122 - protein, 294 aa, Zea mays
MTMYSQSVRAPPPPPCRFVPRPCYVMARPLLVFTPSGALLKAAVRDVWASNFDEELSNLSAVLPRYPCVCVDTEFPGAVHDSDLPRYMRGPRESYELVKRNVDDLKLLQVGIALSGPAGRFPIAWQFNIRGFDPALHPHAPASIAMLREQGMDFAMLNEFGIDPEDFAAGFRCSGLACGRLTWTAFSGSYDFGYLAKALTGGQPLPDTVDGFLALVRRLFGHSVFDVKHLARCCAMRGGLEQVATALGVKRAAGRAHCAGSDSLLTTDVLLLMLHRFFRNVDVLAHAGTIVDLT

SEQ ID NO: 12123 - protein, 321 aa, Haemophilus somnus 2336
MIKKIAVLTSGGDAPGMNAAIRGVVRSALSEGLEVYGIYEGYYGLYHNKIQQLTRYSVSDIINRGGTFLGSARFPEFKDPAVREKCVEILRSHGIDALVVIGGDGSYMGAKLLTEEHDFPCVGIPGTIDNDVAGTDYTIGYQTALETAVEAIDRLRDTSSSHKRISIVEIMGRHCSDLTISAAIAGGCEYIVASEIEFNREELIKQIERAIIKGKRHAIIAITELLCDVNELAREIEARVKHETRATILGHIQRGGTPCAFDRILGSRMGVYAVDLLLQGKGGYCVGIQNEQLVHHDIIDAINNMRREFKADWLAMSKRLD

SEQ ID NO: 12124 - protein, 383 aa, Anabaena variabilis ATCC 29413
MAKHLGKKIAPIPMSTDISVVDLIDNYFTAYNSARLREASQLLACDILKDGVTVGVSLSGAMTPAGFGVSALAPLIRNGFIDWMISTGANLYHDMHYGLGFELFAGNPFLDDVKLREEGTIRIYDIIFGYDVLLETDAFIRKILQAEPFQKRMGTAEFHYLLGKYVREVEKQLGVKHSCLLATAYEYGVPIYTSSPGDSSIGMNVAALALEGSQLVLDPAIDVNETAAIAYNAREGEGKSAAVILGGGSPKNFLLQTQPQIHEVLGLEERGHDFFVQFTDARPDTGGLSGATPAEAVSWGKIDPDELPSTIVCYTDSTIALPLVTAYILNQCPPRPLKRLYDRREELYDKLRTDYLAAKDQPVEKVATNGEVATYPCGTPIRQ

SEQ ID NO: 12125 - protein, 133 aa, Triticum aestivum
MAESAAIAPPPQPMTPPQPMAENATEAPPQPMAPPQQMAENATAAPPPQPMAENATAAPPPQPMVENATVVVVVPPPPPDSTTTFLCLILAFFLPPLGVFLKYKCEIEFWICLILTFLAYAPGIIYAVWVIVK

SEQ ID NO: 12126 - protein, 161 aa, Glycine max
MEPMDIVGKSKEDASLPKATMTKIIKEMLPPDVRVARDAQDLLIECCVEFINLVSSESNEVCNREDKRTIAPEHVLKALQVLGFGEYVEEVYAAYEQHKLETMALLYRLSGDYNPLHSDPMVAKVAGFSQPILHGLCTLGFAVRAIIKCICRGDPDLIKSV

SEQ ID NO: 12127 - protein, 255 aa, Triticum aestivum
MRKKLGTRFPAARIKKIMQADEDVGKIALAVPVLVSRALELFLQDLIDHSYKITLQSGAKTLNSFHLKQCVKRYSSFDFLTEIVNKVPDLGGGESCGDERGLPRRRKFSNGSDPENEEPRSSKMPIRSLNTSPRGRGRGRGRGRGRPPTKRKEIGYVQFEDESSMFAEQSEPLPGDEIVPETNRGNESIPQSSHPLVEAPSAMTPAVISKVEEASTNHQPDWPMPDAIGGIGVGPSSFGHLTVQVDEVEDYDNED

SEQ ID NO: 12128 - protein, 365 aa, Mycosphaerella graminicola
MPTYNIVVFGGDHCGPEVTAEALKVLDVIDNSNADVHFNIQPHLLGGASIDAHGEPLTDEALAAAKAADAVILGAIGGPKWGTGKVRPEQGILRLRKEMGTYGNLRPCFFASESLVKTSPLKEEVCRGVNFNIVRELTGGIYFGERTEDDGSGYAVDTEPYSRAEIERVARLAGFLALAEDPPCPVWSLDKANVMATSRLWRKTVTDVFANEFPQLKIGHHLIDSAAMLMVKNPRALNGVIVTSNLFGDIISDEASVIPGSLGLLPSASLTASPDGKSKCNGIYEPIHGSAPDISGKGIVNPVAMILSLGMMCKYSLQQPELAKKIDEAVRNVIEKGINTADIGGSAKTAEVGDAIAKELEALLK

SEQ ID NO: 12129 - protein, 365 aa, Fragaria x ananassa
MGSTGETQMTPTHVSDEEANLFAMQLASASVLPMVLKAAIELDLLEIMAKAGPGSFLSPSDLASQLPTKNPEAPVMLDRMLRLLASYSILTCSLRTLPDGKVERLYCLGPVCKFLTKNEDGVSIAALCLMNQDKVLVESWYHLKDAVLDGGIPFNKAYGMTAFDYHGTDPRFNKVFNKGMADHSTITMKKILETYKGFEGLKSIVDVGGGTGAVVNMIVSKYPSIKGINFDLPHVIEDAPQYPGVQHVGGDMFVSVPKGNAIFMKWICHDWSDEHCIKFLKNCYAALPDDGKVILAECILPVAPDTSLATKGVVHMDVIMLAHNPGGKERTEQEFEALAKGSGFQGIRVCCDAFNTYVIEFLKKI

SEQ ID NO: 12130 - protein, 483 aa, Burkholderia fungorum LB400
METETDLRRHDLLIDGKRLPPGTGEYSVDIDPATEEPIALVAQGSAADVDAAVHAARAALKVWNAIRSAERGRILMRLAGLMRANLEELAALESLDAGKPIAAVMRQDIPAAIDTLEYYAGWCDKINGQVVPVRPDALTYTLREPVGVVAAIVPWNFPLMIGMWKIAPALACGCTLIVKPAEITPLSALRIGELALEAGVPPGVLNIVTGKGRVVGDALVAHPGVDKVTFTGSPSVGRGILQGAAGNFKRVTLELGGKSANLIFPDANLDNAVRAAAAGIFFNTGQVCSAGSRILAHRDVYDEVVERLAARARSIKVGDPSSRETSMGPLISAAQMKTVLGYVETGRAEGASLVTGGARVGERGFFVEPTVFADVEHEMRISQEEIFGPVVSVIRFDDEADAIRIANGTLYSLAAGVWSADIGRVHRVARDLRAGTVWINTYGYTDVRLPWGGSGDSGFGREHGDVAIENFTEPKAVWLAIDQ

SEQ ID NO: 12131 - protein, 211 aa, Brassica napus
  unsure (1)..(211): unsure at all Xaa locations
MERGGFHGYGKFSLNTTNPSDPAKLLMAESGMQLPEPNQPTKTANGGQEECTVREQDRFMPIANVIRIMRRILPAHAKISDDSKETIQECVSEYISFVTGEANERCQREQRKTITAEDVLWAMSKLGFDDYIEPLTLYLHRYRELEGDRGVNCGVGSVSMTNGMVLKRPNGTMAEYGPYGTMAPYRYHHQNGFAYSGNDPNXKMGGSSSSF

SEQ ID NO: 12132 - protein, 377 aa, Candida albicans
MSADGEFTRTQIFGTVFEITNRYTELNPVGMGAFGLVCSAVDRLTGQNVAVKKVMKPFSTSVLAKRTYRELKLLKHLKHENLITLDDIFISPLEDIYFVNELQGTDLHRLLNSRPLEKQFIQYFTYQIMRGLKYIHSAGVIHRDLKPSNILINENCDLKICDFGLARLQDPQMTGYVSTRYYRAPEIMLTWQKYDTEVDLWSVGCILAEMIEGKPLFPGKDHVHQFSIITELLGSPPADVIDTICSENTLRFVQSLPHRDPIPFSERFASCTHVEPEAIDLLAKLLVFDPKKRISAVQGLTHPYMEAYHDPTDEPVCESKFDWSFNDADLPVDTWRVMMYSEILDFHQTVGVANETEGSEQPDSQVEQNNLDSANGA

SEQ ID NO: 12133 - protein, 454 aa, Rubrobacter xylanophilus DSM 9941
MSAFDLIVRGGTVVRGGCEVADVGVADGVISAVGPDLEGGAREEIDARGLLVLPGAIDAHVHFNEPGRTRWEGFASGTRALAAGGTTLCVEMPLNAHPPTTDGESFDLKLAAAKASAHVDFALWGGIVPGRVGRMEELAGRGVAGFKAFMSATGTPDFEAADDLTLYEGMQEAARLGLPVLVHAENRQITDALARRATSALRTTMRDYLASRPAVAELEAIGRAILLASEAGCSLHIVHVSTGRGVALVAAARERGVDVTCETCPHYLLFTDEDAVRIGAAAKCAPPLRPREEVESLWEQVLAGNVAFVTSDHSPCPPDMKAGEDMFRAWGGISGCQSLLPALLDEGYHGRGLPPERLAELLSANVARRFGFAGKGGIEEGNDADLALVDPSGEHVLREEDLHYRHPISPYVGRSFRGRVVRTILRGRTVFEGGRVVSGPAGRFVRPQREKGER

SEQ ID NO: 12134 - protein, 403 aa, Mycobacterium avium subsp. paratuberculosis str. k10
MKRVSELLESIQSRAEQGAITDAEIFAAHVGGKLSVSLTSPLDTQRALSIAYTPGVAQVSRAIAADHRQAAHYTWANRLVAVVSDGSAVLGLGDIGPAASLPVMEGKCALFQAYGGLNAIPIVLDTKDPDEIVETLVRLRPTFGAVNLEDISAPRCFEIERRLIEALDCPVMHDDQHGTAIVVLAALMGASKLLGRDMSSLKVVVSGAGAAGVACTNLLMAMGVSDITVLDSRGILHAGRDDMNDVKAALSRRTNPAGLTGSLAEAIRGADVFLGLSGGVVPEEMIAAMAPNGIVFALSNPDPEIHPQIAAKYATVVATGRSDFPNQINNVLAFPGVFRGALEAGARRITEKMMVAAAEAIFSVVSDDLAPDRIVPSPLDTRVGDAVATAVALATEVSDAPAG

SEQ ID NO: 12135 - protein, 158 aa, Escherichia coli K12
MKLISNDLRDGDKLPHRHVFNGMGYDGDNISPHLAWDDVPAGTKSFVVTCYDPDAPTGSGWWHWVVVNLPADTRVLPQGFGSGLVAMPDGVLQTRTDFGKTGYDGAAPPKGETHRYIFTVHALDIERIDVDEGASGAMVGFNVHFHSLASASITAMFS

SEQ ID NO: 12136 - protein, 458 aa, Burkholderia cepacia R18194
MTEETMASVISASKVDADAAVAAARRAFDHGPWPRMSLHQRMEVMARLRELLIEHESLIAHLVTEEMGCPISISRWMQAGGPISMLGMFLEVAPHYPFSQIRRTVTGNGLVLREPLGVVAAVVPWNAPLQIAVLKLAPALLAGNTAILKPAPETPLDACLLAELAEKAGLPKGVLNVLPADREVSEYLCLHPAVDKVSFTGSSAAGQRLGALCGNDIKRITLELGGKSPAIVLDDADIGKAVESLRMGSLRNSGQVCSNKTRLLVSKHRKDELIDAFVEMVRSMPVGDPFDPLTQIGPLVSARQRDRVEGYIAKGKQEARLVLGGGRPKGLTRGWFVEPTIFADVDPDAVIAQEEIFGPVISILSFDTDDDAVAIANNSAYGLHGAVFSADTERAVNVARRVRTGAIDINGASAGYHSPLGGRKKSGIGREAGIEGFDGYVEIKSIGIPVSYAEQLSS

SEQ ID NO: 12137 - protein, 117 aa, Spinacia oleracea
MASSAVIKLACAVLLCIVVAAPYAEAGITCGMVSSKLAPCIGYLKGGPLGGGCCGGIKALNAAAATTPDRKTACNCLKSAANAIKGINYGKAAGLPGMCGVHIPYAISPSTNCNAVH

SEQ ID NO: 12138 - protein, 500 aa, Schizosaccharomyces pombe
MTIDLNVIQSDIISARRAPENSLFIDGKFVSPIEPAAKPIPLINPATEEIIGTCANASAKDVDSAVENAYNTFRSGIWAKWPGKQRGLVLRKIAKMMREKRELLAGIDTINCGKPTPYALFDIDSCADMFEYYAEVAETDNPTVKVPLPNNPGFCAFEKRFPRGVIGVITPWNFPLKMALWKLVPAIASGNCVVLKPSELAPWSCLEFALICKEAGLPDGVLNVIIGSGKESGAALSCHPKIAYLAFTGSLATGKKIMHAAAENIVPLTLELGGKSPLIICEDADLSLAIPSAAFAIFFNQGEACTAASRLIVHESVADEVLGGLVSEANKLIIGNGLDPQVTLGPVVSKTQFEKIVSYIQSAINEGCKCVVGGLPRSEQKGYFIPPTVFTNVQTHNKIWREEIFGPVLAVKTFHTNEEALELANDSEYGLGSGVFSTNPKTLEFFSNNIEAGMCSLNNYHVVTHELPWIGWKHSGLGVGLSKHGYNEYMRLKQITQYVG

SEQ ID NO: 12139 - protein, 103 aa, Zea mays
  unsure (1)..(103): unsure at all Xaa locations
MMLAYMDRRCFADVPGGALWEEVLHWAVDNHGLAPASWTDYLRLTVGGTLSNGGVSGQSFRYGPQVSNVXELEVVTXDGERRXCSPSSHPDLFFXVVGXLXQF

SEQ ID NO: 12140 - protein, 499 aa, Glycyrrhiza echinata
MDILSLLSYSVFYLALFFIFNIVIRARKFKNLPPGPPSLPIIGNLHHLKRPLHRTFKGLSEKYGHVISLWFGSRLVVVVSSASEFQQCFTKNDVVLANRPRFLSGKYIFYNYTTLGSTSYGEHWRNLRRITALDVLSNHRINSFSGIRRDETQRLITRLADDSSTNFAEIELSYRFYDMTFNNIMRMISGKRYYGEDCDMSDLQEASQFRDMVSELLQLSGANNKTDFMPLLRFLDFENLEKRLKDISGKTDAFLRGLIQEHRAKKERANTMIDHLLNLQDSQPEYYTDQIIKGLALAMLLAGTDSSAVTLEWSMSNLLNHPEVLKKVKDELDTHVGQDRLVDESDLPKLSYLKNVINETLRLYTPAPLLLPHSTSDECNIGGYKVPQDTIVLINAWAIHRDPELWTEATTFKPERFEKKGELEKLIAFGMGRRACPGEGLAIRAISMTLALLIQCFDWKLTNGDKIDMAERDGFTLTKLVPLKAMCKSRPVINKVFKQ

SEQ ID NO: 12141 - protein, 159 aa, Triticum aestivum
MAGMVFGLETPMMTALQHLLDIPDGEAGAAAGEKQGPTRAYVRDARAMAATPADVKELPGAYAFVVDMPGLGSGDIKVQVEDERVLVISGERRREEKEDAKYLRMERRMGKLMRKFVLPENADMEKISAACRDGVLTVTVDKLPPPEPKKPKTIQVQVA

SEQ ID NO: 12142 - protein, 359 aa, Haemophilus somnus 2336
  unsure (1)..(359): unsure at all Xaa locations
MLPVTEXIGGYFMKINTLSCVVKGAKSVDVISQEIEFDEQSQDQTLIQITRGSICGSDLHYYEHGKVGNFAIKHPMILGHEIIGKIVKTNAPNLFEGQKVAINPSKPCLSCAYCLSGYSNQCETMRFFGSAMYNPHVDGGFTQYKIVDNNQCIPYSQEVSDEVMVFAEPLAVTIHAAKQGGDLQGKKVFISGVGPIGCLAVAAVKALGAAEIICSDISQRCLDLALEMGATKVLHATEGNFSEYLQNKGEFDVSFEASGHISSIERCLAVTKAKGTIVQIGMGGSIPQFNMMPLISKEINWKGSFRFVEEFNTAVKWLSLGKINPLPLLSEIYPFEQLETALQRAGNKNEISKIQLNFA

SEQ ID NO: 12143 - protein, 497 aa, Pseudomonas putida KT2440
MLSELPILPATRAFLERKLKMRIGADWQDAASGRTLSFRNPATGEVLGEVPAAEAEDVDRAVRAARQAFDDSPWSRMRPRERQNLLWRLADLMERDARQLAELECLNNGKSAAVAQMMDVQLAIDFLRYMAGWATKIEGSTVEASMPLMPNDQFHGFVRREAVGVVGAIVAWNFPLLLACWKLGPALATGCTVVLKPADETPLSVLKLAELVDEAGYPAGVFNVVTGTGLNAGAALSRHPGVDKLTFTGSTEVGKLIGKAAMDNMTRVTLELGGKSPTIVMPDANLQEAAAGAATAIFFNQGQVCCAGSRLYVHRKHFDNVVADIAGIANAMKLGNGLDPAVQMGPLISAKQQDRVTGYIELGRELGATIACGGEGFGPGYFVKPTVIVDVDQRHRLVQEEIFGPVLVAMPFDDIDEVIGMANDNPYGLGASIWSNDLAAVHRMIPRIKSGSVWVNCHSALDPALPFGGYKMSGVGREMGSAAIEHYTELKSVLIKL

SEQ ID NO: 12144 - protein, 434 aa, Escherichia coli
MKTRTQQIEELQKEWTQPRWEGITRPYSAEDVVKLRGSVNPECTLAQLGAAKMWRLLHGESKKGYINSLGALTGGQALQQAKAGIEAVYLSGWQVAADANWRPACIRISRSIRQTRCPAVVERINNTFRRADQIQWSAGIEPGDPRYVDYFLPIVADAEAGFGGVLNAFELMKAMIEAGAAAVHFEDQLASVKKCGHMGGKVLVPTQEAIQKLVPARLAADVTGVPTLLVARTDADAADLITSDCDPYDSEFITGERTSEGFFRTHAGIEQAISRGLAYAPYADLVWCETSTPDLELARRFAQAIHAKYPGKLLAYNCSPSFNWQKNLDDKTIASFQEQLSDMGYKFQFITLAGIHSMWFNMFDLANAYAQGEGMKHYVEKVQQPEFAAAKDGYTFVSHQQEVGTGYFDKVTTIIQGGTSSVTALTGSTEESQF

SEQ ID NO: 12145 - protein, 507 aa, Bordetella parapertussis 12822
MTTVHSATPEETRRLLQQLGVDPARYDGGTLEVRSPIDGQAIARLPELTAEQARARVADARQAFLAWRKVPAPRRGELVRLLGEELRAAKAELGRLVSIETGKILSEGEVQEMIDICDFATGLSRQLYGLTIATERAEHRMMETWHPAGPVAIISAFNFPVAVWAWNAAIALVCGDSLLWKPSEKAPLTALATQALLERALARFGDAPAHLSQVLIGGREVGEALVDDPRIPIVSATGSTAMGRKVGPKVAERFGRSILELGGNNAAIICPSANLDLALCGIAFSAMGTAGQRCTSLRRIFVHEQIADDLVARLQQVYESVAIGDPRDSGTLIGPLRDQAAFDAMQRSLADARAAGGRVTGGAREPVGGHDQAYYARPALVEMPAQSEVVERETFAPILYVMRYRDLDEAIALQNDVPQGLSSSIFTNDLREAERFVSAEGSDCGIANVNIGPSGAEIGGAFGGEKETGGGREAGSDSWKAYMRRTTNTVNYGNALPLAQGVKFDVA

SEQ ID NO: 12146 - protein, 299 aa, Glycine max
  unsure (1)..(299): unsure at all Xaa locations
MCGILAVLGCVDNSQTKRARIIELSRRLRHRGPDWSGIHCYEDCYLAHQRLAIVDPTSGDQPLYNEDKTVIVTVNGEIYNHKQLRQKLSSHQFRTGSDCEVIAHLYEEHGEEFVNMLDGMFAFILLDTRDKSFIAARDAIGITPLYLGWGHDGSTWFASEMKALSDDCERFISFPPGHIYSSKQGGLRRWYNPPWFSEDIPSTPYDPTLLRETFERAVVKRMMTDVXPFGVLLSGGLDSSLVAAVVNRYLAESESARQWGSQLHTFCIGLKGSPDLKAAKEVADYLGTRHHELYFTVQE

SEQ ID NO: 12147 - protein, 224 aa, Listeria monocytogenes str. 4b F2365
MINQKKIAGEKACEWIKDGMVVGLGTGSTVYYTIEKLGEMVNNGLHITGVATSEETSKQAQNLGIPLKSLNDVAEIDITIDGADEIDTDFQGIKGGGGALLREKMVASASLKNIWVVSEEKLVRNLGKFPLPIEVIPFGWKQIERTLEKEHIQTILRRQSSGEIYVTNNGNYILDIVNQTFRDAEMWQEKLAQIPGIVEHGLFLHYVDIIVCAKANGEIELIKK

SEQ ID NO: 12148 - protein, 383 aa, Nostoc sp. PCC 7120
MAKHLGKKIAPIPMSTDISVVDLIDNYFTAYNSARLREASQLLACDILKDGVTVGVSLSGAMTPAGFGVSALAPLIRNGFIDWMISTGANLYHDMHYGLGFELFAGNPFLDDVKLREEGTIRIYDIIFGYDVLLETDAFIRKILQAEPFQKRMGTAEFHYLLGKYVREVEKQLGVKHSCLLATAYEYGVPIYTSSPGDSSIGMNVAALALEGSQLILDPAIDVNETAAIAYNAREGEGKSAAVILGGGSPKNFLLQTQPQIHEVLGLEERGHDFFVQFTDARPDTGGLSGATPAEAVSWGKIDPDELPSTIVCYTDSTIALPLVTAYVLNQCPPRPLKRLYDRREELYDKLRTDYLAAKDKPVEKVATNGEVATYPCGTPIRQ

SEQ ID NO: 12149 - protein, 250 aa, Zea mays
MAKNYPTVSAEYSEAVEKARRKLRALIAEKSCAPLMLRLAWHSAGTFDVSSRTGGPFGTMKHQSELAHGANAGLDIAVRLLEPIKEEFPILSYADFYQLAGVVAVEVTGGPEIPFHPGREDKPQPPPEGRLPDATKGSDHLRQVFGKQMGLSDQDIVALSGGHTLGRCHKERSGFEGAWTTNPLVFDNSYFKELLSGDKEGLLQLPSDKALLSDPVFRPLVEKYAADEKAFFDDYKEAHLKLSELGFADA

SEQ ID NO: 12150 - protein, 438 aa, Desulfovibrio desulfuricans G20
MALFTKEEALHYHEAPRHGKVEVIPVKPCRNQKDLSMAYSPGVAEACKAIKEDPSKAEIYTGRSNLVAVVSDGTAVLGLGNIGPLAGKPVMEGKGVLFKTFADIDVFDINLDVSSADQLIGVVKALEPTFGGINLEDIKAPECFYIEDTLKKEMNIPVFHDDQHGTAVISGAGLLNALEITNRKAENMKVVVVGAGAAGIACAKFYVSLGVDPANIYMFDSRGLIHKGRKDLNEYKALFAQPSDAGTLAEVMKGADMFLGLSTKNLVSQDMVRSMAKDPVLFAMANPDPEITYPDAKQASPNCIMGTGRSDFPNQVNNVSGFPYIFRGALDVGATEINEEMKVAAARSLAALAKEPVPSEICDMYGVKELTFGVDYVIPKPLDPRVLVWETPAVAKAAMDSGVARKPIADMEAYKKQLTTRFDESRKRIARVVDSYGL

SEQ ID NO: 12151 - protein, 168 aa, Sorghum bicolor
MAAASSATSVHDFTVKDASGKDVDLSTYKGKVLLIVNVASQCGLTNSNYTELAQLYEKYKDQGFEILAFPCNQFGGQEPGTNEEIVQFACTRFKAEYPIFDKVDVNGNNAAPIYKFLKSSKGGLFGDSIKWNFSKFLVDKEGRVVDRYAPTTSPLSIEKDIKKLLGSS

SEQ ID NO: 12152 - protein, 327 aa, Triticum aestivum
  unsure (1)..(327): unsure at all Xaa locations
MASTTAAVPEVALRSGGARPMPAIGMGTATFPVVPETTVKAVLEAVEVGYRHFDTAAMYATERPLGEALAEAVRRGLLASREEVFVTSKLWCTQCHPHLVLPSLRESLQNLQMEYVDLYLIHWPISLKPGPTVFPVKREDAVPFDFEGVWRAMEECHRLGLAKAIGVSNFTTSHLDKLLAXATVHPAVNQVELNPVWQQRKLREYCAEKGIHVAAYSPLGGQNWSGDGNAVLDSEVLAEIAKARGKTVAQVALRWIYEQGVTPIVKSFSKERLKENLGIFDWGLTDDDLRKIGQIPQKKIVKAETVLFSAEGEFTSADLADMEIVED

SEQ ID NO: 12153 - protein, 354 aa, Zea mays
  unsure (1)..(354): unsure at all Xaa locations
MDLASFITSVLTSFLIFVALVLLFTWLSRRPGNAPVYYPNLLLRGLDPWAGRGRGTRSPVGWLRDAISASEPDVVAAGGVDAAVYLVFLSSVLSILVYSGIVLLPVLLPVAATGGALSTIPIPTNKSAQSAQNFSSIERLGMGNVAEKSMRLWAFLLSVYWVSFVTYFVLWKSYKHVSNLRATARSAPDVKPEXFAVLVRDIPRPSPDETIKDSVDSYFRALHPNTFYRSMVVTDHTKADKIYREIEGHKRKIARAEVIYANSKTESNTEGTRPTHRTGFLGLIGTKVDTIEYCSEQIKELLPKLEAEQKTTLHEKQQRAAIVVFNSRSAAAFASQTLHAQVYDKWDSYGKLLN

SEQ ID NO: 12154 - protein, 206 aa, Paracoccidioides brasiliensis
RRLPRQLLPLFRPSILPNHAVRTFACSCSRMGSPLPPVTPPVSTAHASDSFQLLSSAEKTGPAEDALFNEQVKAVTEWWNTPRYEGIRRPYSAEAVVSKRGSLQQTYPSSIMARKLFNLLNERAKTGKPVHTLGAIDPVQMTQQAPNQEVLYISGWACSSLLTTTNEVSPDFGDYPYNTVPNQVQRLFKAQQMHDSKQWDSRRKLS

SEQ ID NO: 12155 - protein, 95 aa, Zea mays
HASAHASAHASAHASALSSASPLARLISRRGLAGAADGHGSAKVPLWKDPLSPSKWKEEHFVLASLSMWGVIFYGGYKLFSGKKEAKTEAASPQA

SEQ ID NO: 12156 - protein, 225 aa, Paracoccidioides brasiliensis
YWAEVQAVKEWWQDSRWRYTKRPFTAEQIVAKRGNLKIEYPSNVQSKKLWGILEERFKNKTASFTYGCLEPTMLTQMVKYLDTVYVSGWQSSSTASSTDEPSPDLADYPMNTVPNKVNQLWMAQLFHDRKQREERLRAPKSQRASLPNIDYLRPIIADADTGHGGLTAVMKLTKLFIERGAAGIHIEDQAPGTKKCGHMAGKVLVPISEHINRLVAIRAQADIMG

SEQ ID NO: 12157 - protein, 305 aa, Sulfolobus shibatae
MPLDPRIKKLLESGFVVPIGKASVDEVRKIFRQLASAAPKAEVRKVEDIKIPGSETSINARVYFPKAKGPYGVLVYLHGGGFVIGDVESYDPLCRAITNACNCVVVSVDYRLAPEYKFPSAVIDSFDATNWIYNNLDKFDGEMGIAIAGDSAGGNLAAVVALLSKGKLDLKYQILIYPAVGFDSVSRSMIEYSDGFFLTREHIEWFGSQYLRSPADLLDFRFSPIIAQDLSGLPPALIITAEYDPLRDQGEAYANRLLQAGVPVTSVRFNNVIHGFLSFFPLIDQGKDAIGLIGSVLRRTFYDKS

SEQ ID NO: 12158 - protein, 159 aa, Glycine max
MSDAPASPSHESGGEQSPRGSLSGAAREQDRYLPIANISRIMKKALPPNGKIAKDAKDTMQECVSEFISFITSEASEKCQKEKRKTINGDDLLWAMATLGFEDYIEPLKVYLARYREAEGDTKGSARSGDGSARPDQVGLAGQNAQVQPQSGYAFNARP

SEQ ID NO: 12159 - protein, 415 aa, Arabidopsis thaliana
MEQLWLFENEDRISELHEALLVHIMSSLPTKTVVATSVLSKRWRHVWKTVQNLKFVSKYHQTFSEDVYRFFMLHKAPFLESLDLEFSNQLDASDLGILVGIAFARHVRNLVLDLDYYSNFSQLCAARFPSGLCIYDNNKTLETLTLKHSILLYFPYRVCLKSLRKLHLYKVHFYGKDSVYNLLCGCPSLRDLIVHRYRECMETFTIAVPSLERLTIEDSGFGYGCCYVINAPSLKYLNIRRFKYLNSCLIEKAPELAEAKVSDVSDIENENILESLTSAKRLSIHLSPLEWWNLLTFMLEASPKLQILKLTDLNMSSTKGNQIGQKWIQPKCVPECLLFHLETFVWTGYEWQRRDEKEVARYILRNTTSLKKATFSTKPIEPVKLKVFKKRREILNELASLGRASNPSDFVFESI

SEQ ID NO: 12160 - protein, 217 aa, Triticum aestivum
PGPEGLEFHKAHGMTMYEYTKTDARLNRVFNEAMKSYTTIVTGKLVELYTGFEDVATLVDVGGGVGATIRAVTSKYPHIKGINFDLPHVIAEAPQSPGVEHVAGDMFKNVPSGDAIVLKWILHNWTDEHCTTLLRNCYNALPAHGKVVVVEGILPVEPEATSRGQQASLSDMIMLTHTAGGKERNQREFEQLAKAAGFTGVKTAYIYSNTWVIELTK

SEQ ID NO: 12161 - protein, 264 aa, Haloarcula marismortui ATCC 43049
MVGVGTWDIDGDTVQKSVRAGLNVGYAHVDTAEGYKNESEIGEALADYDREDVFLTSKVLPKHLDYESVIEACEASLDRLGTDYLDLYLVHWPNPATSIRETMNAMATLHDQGKIRNVGVSNFSAYQLGAAQHVADVPIAVNQIEYHPWNTQDQVVEFCRDTDTVVEAAAPLGRTKVFADDIIQDLSEKYDRSPAQIVLKWAVENNVVVLPKSSSPEHVRQNFDLFDWELDATDRERIDAIEREQAVYDTGINDWDNDTYGISQ

SEQ ID NO: 12162 - protein, 302 aa, Synechocystis sp. PCC 6803
MGEEPVPADKALGKKFKKKNASWSIEESEALYRVEAWGAPYFAINAAGNITVSPNGDRGGSLDLLELVEALRQRKLGLPLLIRFSDILADRLERLNSCFAKAIARYNYPNTYQAVYPVKCNQQRHLVEALVRFGQTSQCGLEAGSKPELMIALATLPPPLDRQDKHTKPLIICNGYKDQDYLETALLAKRLGHRPIIIIEQLRELEWVLHISQQLNIKPMLGVRARLSCQSLKSSEISSGNGDRAKLGLTMPDIVTVIHRLEENNCLDCLKMLHFHLGTQVSDIALIKEAMREASQLYVELV

SEQ ID NO: 12163 - protein, 537 aa, Glycine max
MAALNLCRMALRSSKLLSRPYHRLSVQLQMQMQPSSPPLTRKMSMDAQSVASQLNSSGLLRTQGLIGGKWSDAYDGKTIKVYNPATGESIVDVACMGGRETNDAISAAYDAYGSWSKTTAAERSKLLRKWYDLLMVHKEELAQLITLEQGKPLKESVGEIVYGAGFIEFAAEEAKRIYGDIVPAPFSDRRLFVLKQPVGVVGAITPWNFPLAMITRKVGPALACGCTVVIKPSELTPLTALAAVELSIQAGIPPGVVNVVMGNAPDIGDALLASPQVRKITFTGSTAVGKKLMAGSAETVKKVSLELGGNAPCIVFDDADLDVAVKGTLAAKFRNSGQTCVCANRIIVQEGIYEKFANALRDAVQNMKVGDGFSEGVSQGPLINEAAVKKVESLIHDATSKGAKVILGGKRHSLGLTFYEPTVISDVNSDMHISREEAFGPVAPLLRFKTEEEAIRIANDTNAGLGSYVFTNSIQRSWRVAEALEYGLVGVNEGVISTEVAPFGGFKQSGLGREGSKYGMDEYLEIKYVCFGNMNKE

SEQ ID NO: 12164 - protein, 234 aa, Deinococcus radiodurans
MEFFIDTAIVDEIREINAWGVLSGVTTNPSLIVASGRDFKEVIGEIAELVPGGAISAEVTALDAEGMIKEGKDVAAWHKQVVVKLPLTPAGLQACKALTSEGIKTNVTLCFSVPQALLAARAGATYVSPFVGRVDDTGWDGSELIRQIKEAFVLGDIQTKVLAASIRHPQHVVQAALAGADVATIPYKVFTQMVKHPLTQAGLDSFMADWAKRQGASPETPPSEAGTNPVKKEG

SEQ ID NO: 12165 - protein, 316 aa, Methylomonas aminofaciens
MANLFDQLKEFTTIVADTGDVEAIKSVKPYDATTNPSLLLKASTLPQYAPLIDEAIAYAKSQSGDKAQQIEDAADKLAVLIGQEILKHIPGKISTEVDARLSFDTDAMVQKGRKLIKLYADAGISKDRVLIKLASTWEGIKAGEILEKEGINCNLTLLFSFAQARACAEAGVFLISPFVGRILDWYKAKTGENYTSETDPGVLSVRKIYAYYKEHGYKTVVMGASFRNTGEITALAGCDRLTVSPNLLERAEGYRRYLPRVLVDNGATKQRPALLTEKEFRFDQNEDAMATEKLAEGIRGFVVDQNKLEKALAEKL

SEQ ID NO: 12166 - protein, 284 aa, Glycine max
MGVFSENPNPDPVVIRQVWASNLESEFQLIRELIDHYPFISMDTEFPGVVFRPHLDPTKPYNHRNNNRNRHSDHYRLLKSNVDALNLIQVGLTLTDAAGNLPDLAGNRSIWEFNFRDFDVARDAYALDSIDLLRRQGIDFARNATDGVESTRFAELMMSSGLVCNDSVSWVTFHSAYDFGYLVKILTRRNLPTRLEEFLKTVKVFFGDNVYDVKHMMRFCDTLYGGLDRVARTLNVERAVGKCHQAGSDSLLTWHAFQKIVDIYFVKDEHRKHAGVLYGLEVFC

SEQ ID NO: 12167 - protein, 392 aa, Corynebacterium glutamicum ATCC 13032
MTIDLQRSTQNLTHEEIFEAHEGGKLSISSTRPLRDMRDLSLAYTPGVAQVCEAIKEDPEVARTHTGIGNTVAVISDGTAVLGLGDIGPQASLPVMEGKAQLFSSFAGLKAIPIVLDVHDVDALVETIAAIAPSFGAINLEDISAPRCFEVERRLIERLDIPVMHDDQHGTAVVILAALRNSLKLLDRKIEDLKIVISGAGAAGVAAVDMLTNAGATDIVVLDSRGIIHDSREDLSPVKAALAEKTNPRGISGGINEAFTGADLFIGVSGGNIGEDALKLMAPEPILFTLANPTPEIDPELSQKYGAIVATGRSDLPNQINNVLAFPGIFAGALAAKAKKITPEMKLAAAEAIADIAAEDLEVGRIVPTALDPRVAPAVKAAVQAVAEAQNA

SEQ ID NO: 12168 - protein, 159 aa, Listeria monocytogenes str. 4b F2365
MNVHDFSEKAMNGKEIALSDYKGKVLLIVNTASKCGLTPQLEGLEAMYKKLGGANFEILGFPCNQFLRQDPGSDEEILEFCQMNYGVTFQMFSKIKVKGKDASPLYKYLTEQTGGKKVEWNFAKFLIDENGEVVERFPSKMKPADFEDKVEALVAKVNN

SEQ ID NO: 12169 - protein, 407 aa, Pseudomonas aeruginosa PAO1
MIGFEIFLAIGMFTAIVLGLVAIILVARAKLVSSGDVTIQINGEHSLTVPAGGKLLQTLAANNVFLSSACGGGGTCAQCKCVVVEGGGEMLPTEESHFTRRQAKEGWRLSCQTPVKQDMQIRVPEEVFGVKKWECTVESNPNVATFIKELTLRLPDGESVDFRAGGYVQLECPPHVVEYKDFDIQPEYRGDWDKFNMWRYVSKVDETVIRAYSMANYPEEKGVVKFNIRIASPPPGSDLPPGQMSSWVFNLKPGDKVTVYGPFGEFFAKDTEAEMVFIGGGAGMAPMRSHIFDQLRRLKSNRKISFWYGARSLREAFYTEEYDQLQAENPNFQWHLALSDPQPEDNWTGLTGFIHNVLFENYLKDHPAPEDCEFYMCGPPMMNAAVIKMLTDLGVERENILLDDFGG

SEQ ID NO: 12170 - protein, 618 aa, Zea mays
MDSDYGVPRELSEVQKKRALYQPEVPPCLQGTTVRVEYGDAAIAADQAGAHVISHAFPHTYGQPLAHFLRKTAVVLDAKVISEHPVVRVGIVFCGRQSPGGHNVVWGLYEAIKAHNQNSKLIGFLGGSDGLLAQRTLEITNEVLASYKNQGGYDMLGRTKDQIRTTEQVNGAMASCQALKLDALVIIGGVTSNTDAAQLAETFAEAKCATKVVGVPVTLDGDLKNQFVETTVGFDTICKVNAQLISNVCTDALSAEKYYYFIRLMGRKASHVALECALQSHPNMVILGEEVAASKLTIFDITKQICDAVQARAEKDKNHGVILIPEGLVESIPELYALLQEIHGLHGKGVSVENISSQLSPWASALFEFLPPFIRKQLLLHPESDDSAQLSQIETEKLLAQLVETEMNRRLKEGTYKGKKFNAICHFFGYQARGALPSKFDCDYAYVLGHVCYHIIAAGLNGYMATVTNVKSPVNKWRCGAAPISSMMTVQRWSRGPSATQIGKPAVHMASVDLKGKAYDVLRQNSSSFLLEDVYRNPGPLQFEGPGADSKPISLCVEDQDYMGRIKKLQEYLEKVKRIVKPGCSQDVLKAALSAMSSVTETLNIMTSSSTGQTPLSH

SEQ ID NO: 12171 - protein, 441 aa, Lotus corniculatus var. japonicus
MNQPKIKRRVGKYEVGRTIGEGTFAKVKFARNSETGEAVALKILDKEKVLKHKMAEQIKREVATMKLIKHPNVVQLYEVLGSKTKIYMVLEFVTGGELFDKIVNHGRMCEDEARRYFQQLINTVDYCHSRGVYHRDLKPENLLLDACGNLKVSDFGLSALSQQIKDDGLLHTTCGTPNYVAPEVLNDKGYDGATADLWSCGVILFVLVAGYLPFDDPNLMELYKKISAAEFTCPPWLSFSARKLITRILDPNPMTRITIAEILEDEWFKKDYKPPIFQENGETNLDDVEAVFKDSEEHHVTEKKEEQPTAMNAFELISMSKGLNLENLFDVEQGFKRETRFTSKSPANEIISKIEEAAKPLGFDVQKKNYKMRLANVKAGRKGNLNVATEVFQVAPSLHMVEVRKAKGDTLEFHKFYKKLSTCLEDVVWKTEDDMQKQEAK

SEQ ID NO: 12172 - protein, 212 aa, Oryza sativa (japonica cultivar-group)
MRTGEVAEAVPRVVAILSSLLQRVAERNDAAAAAAAVGEEAAAVSAFQGLTKPAISIGGYLERIFRFANCSPSCYVVAYIYLDRFLRRRPALAVDSFNVHRLLITSVLTAVKFVDDICYNNAYFARVGGISLMEMNYLEVDFLFGIAFDLNVTPAAFASYCAVLQSEMTYLEQPPAVDLPRLHCCPSDQDDAGCHHKQQQQQQQQQQHQLAV

SEQ ID NO: 12173 - protein, 467 aa, Glycine max
  unsure (1)..(467): unsure at all Xaa locations
MEQKGGVLMQRYELGRLLGQGTFAKVYHARNIITGMSVAIKIIDKEKILKVGMIDQIKREISVMRLIGHPHVVELYEVMASKTKIYFVMXHEKGGELFNKVFKGKLKEDDARKYFQQLISAVDYCHSSGVCHRDLKPENLLLDENENLKVTDLGLSALAESKCQDGLLHTTCGTPAYVAPEVINRRGYDGIKADIWSCGVILYVLLAGHLPFXNTNLMEMYRKIGRGEFKFPKWFAPDVRRFLSKILDPNPKARISMAKIMESSWFKKGLEKPTITQNEDEELAPLDADGVFGACENGDPIEPAKNSKPCNNLNAFDIISYSSGFDLSGLFEETDRKKEERFTSDKPASIIISKLEEICRRLRLKVKKKDGGLFKLEGSKEGRKGPLGIDAEIFEITPVFHLVELKKSSGDTLEYQKLLKQEVRPALKDIVWNWQGEQPQPLQHGVVQKEEQPSYPGISEVVPQSTA

SEQ ID NO: 12174 - protein, 176 aa, Triticum aestivum
  unsure (1)..(176): unsure at all Xaa locations
MAPTVMASSATSVAPFQGLKSTAGLPVSRRSSSAGLGSVSNGGRIRCMQVWPIEGIKKFETLSYLPPLSTEALLKQVDYLIRSKWVPCLEFSKVGFVFREHNSSPGYYDGRYWTMWKLPMFGCXTDATQVLNEVEEVKKEYPDAYVRVIGFDNLRQVQCVSFIAFRPPGCEESGKA

SEQ ID NO: 12175 - protein, 294 aa, Saccharomyces cerevisiae
TTPLVHVASVEKGRSYEDFQKVYNAIALKLREDDEYDNYIGYGPVLVRLAWHTSGTWDKHDNTGGSYGGTYRFKKEFNDPSNAGLQNGFKFLEPIHKEFPWISSGDLFSLGGVTAVQEMQGPKIPWRCGRVDTPEDTTPDNGRLPDADKDADYVRTFFQRLNMNDREVVALMGAHTLGKTHLKNSGYEGPWDATNNVFDNSFYLNLLNEDWKLEKNDANNEQWDSKSGYMMLPTDYSLIQDPKYLSIVKEYANDQDKFFKDFSKAFEKLLENGITFPKDAPSPFIFKTLEEQGL

SEQ ID NO: 12176 - protein, 430 aa, Pneumocystis carinii
MVEKARTFKTLNPQTMFSTQLIPLNKKFSENGGHITSSFYIHRGYPKHYKFKSLEYVGVSFHYHHQRRGHLEFNITSPSGVTSVLAHRRNRDKHGGSILWTFMTVKHWYFVSFCKIITNDFRGESIVGNWTIDVEDKKDENLDGGVFDWQLHFFGESCESEGVPPPSYPFLSRYPTTTPPPDPDATPSPDLDANLQPDSNADSQPQPDVKPLPSLDIEPQPPSEPDPNPPSYPSSQQDPDTSLSSNPTSTSSSEPPPPPPPRPEPQPQPETQPETQPPQPPQPPQPPQSETQPETQPEPEPEPRPEPEPEPEPEPQPPQSVPQPPQPETQPEPQPEPPASPPKLQPEQKPTSITSSTSTTSSTSTTSSSKTKISTTRKASCTITVFIGPSPTEGVSTGSSVSHLSFFEKRHLLLQMILLLFFFLFLGYSF

SEQ ID NO: 12177 - protein, 292 aa, Leuconostoc mesenteroides subsp. mesenteroides ATCC 8293
MDYKTLASGIEMPLLGFGVFQVQEKGAAKQAVLDAIKTGYRLIDTAASYGNEREVGEAILEAINQGIVKREELFVTSKMWVQDVSAQQATAAIQSSLQRLNLDYLDLYLIHQPYNDVFGAWRAMESAYRSGQLKAIGVSNFDIAQLTNLAEFSDIKPMLNQIEVNPFQQNKKDITYFSQYGVQVEAWAPFAEGKNDLFSNILLRKIADKHHKSIAQIVLRWLTQRNIIVVAKSVKPERMAQNLDIFDFKLTHQELAEIETLDTNSSQFFNHADPDMIKWMANREISYDVTFN

SEQ ID NO: 12178 - protein, 489 aa, Photorhabdus luminescens subsp. laumondii TTO1
MRIQNKMLINGDWIDASDGQTIEVMNPHDGSLITRVAEAKEADVDCAVAAAKAAYPAWGRLQASERGALLLKLADKIEEHAAELAQLETMDTGHPIRDTLNIDVPRTAYCFRYFGGMADKLEGSVIPVEEGFLNYTTREPIGVVGQIVPWNFPLMFTSWKMAPALAAGNTIVIKPSEITPLSTLRIAELMMEVGFPPGVINVVVGYGNSAGARLSEHEDVGKIAFTGSTMTGQSIVAASAGNLKKVQLELGGKGANIIFEDADLTKAVGGSAWAIFHNQGQACIAGSRIILHESIADAFLEKFLTLAGSIRLGDPLLPETEMGPVTSLQHRERVLAYCDVARSQGCEILLGGKPPADPALANGCYIEPTVVRAKYSDRIAQEEVFGPFVTVITFKNDEEALAIANSTEYGLGSGLWTKDISRAHRFARDMHAGMVWINCYKRVNPASPFGGVGRSGYGREMGFEVMREYTQVKSVWVNVDAKIPPFYQR

SEQ ID NO: 12179 - protein, 135 aa, Triticum aestivum
MCPIKKEMSGESGSPCSGENFYSPSTSREHQQAKQAAWTSAPAKRPAGRTKFRETRHPVYRGVRRRGNAGRWVCEVRVPGRRGSRLWLGTFDTAEAAARANDAAMIALSAGGAGCLNFADSAELLAVPAASSYRS

SEQ ID NO: 12180 - protein, 279 aa, Lactobacillus johnsonii NCC 533
MATIQWYPGHMNKAKNQLEDNLDLIDVLIEVLDARLPVSSRNPMIGQLTKKKPHIIVLNKADLADPIQTKKWTHYYQDEGNFVISMDAQHTTNMTSLFKIIKLAGKEKTDKLIAKGASNPMIRVAIAGIPNCGKSTIINRMVGRNAAIVGDKPGVTRGQSWLKTKTNVQILDTPGILWPKFSDQEVGYKLAACGAIKADIFHPDDVALFVIEFLKQNYRDDLVKFARISSEEMDSMSNPDLLLAMTNKYGMRDDYDKFSLFMLQRLRKGKLGRITFDLR

SEQ ID NO: 12181 - protein, 102 aa, Triticum aestivum
MGERVKGTVKWFNVTKGFGFISPDDGGEDLFVHQSAIKSDGYRSLNENDAVEFEIITEDSKARWFIICSQLMEERPHSQEEEIVDADRLSEHTLSSRFGSSV

SEQ ID NO: 12182 - protein, 365 aa, Glycine max
  unsure (1)..(365): unsure at all Xaa locations
MGSTGETQITPTHVSDEEANLFAMQLASASVLPMILKSALELDLLEIIAKAGPGVHLSPTDISSQLPTQNPDAPVMLDRILRLLACYNILSFSLRNSXDGKVERLYGLAPVAKYLVKNEDGVSIAALNLMNQDKVLMESWYYLKDAVLEGGIPFNKAYGMTAFEYHGTDPRFNKVFNKGMADHSTITMKKILETYTGFEGLKSLVDVGGGTGAVVNMIVSKHPTIKGINFDLPHVIEDAPSYPGVEHVGGDMFASVPKADAIFMKWICHDWSDEHCLKFLKNCYEALPDNGKVIVAECILPVAPDSSLATKGVVHIDVIMLAHNPGGKERTEKEFEALAKGSGFQGFRVLCCAFNTYVMEFLKKV

SEQ ID NO: 12183 - protein, 183 aa, Escherichia coli CFT073
MQDSILTTVVKDIDGEVTTLEKYAGNVLLIVNVASKCGLTPQYEQLENIQKAWADRGFVVLGFPCNQFLEQEPGSDEEIKTYCTTTWGVTFPMFSKIEVNGEGRHPLYQKLIAAAPTAVAPEESGFYARMVSKGRAPLYPDDILWNFEKFLVGRDGKVIQRFSPDMTPEDPIVMESIKLALAK

SEQ ID NO: 12184 - protein, 301 aa, Solanum tuberosum
MVSNYISATVSSILLFLLCSSSLFGASMAALVQEQPLVLKYHNGALLKGTVTVNLIWYGKFTPIQRSIIVDFLQSLNSPKAPNPSAASWWKTTEKYKTGASTVTLGKQILDENCSLGKSLKNSHIVYLASKGGYMGRSVNLVLTAKDVFVEGFCSRCGSHGSTRGKVRFTYAWVGNSETQCAGQCAWPFHQPIYGPQTPPLLAPNGDVGVDGMIINVATVLAGTVTNPFNNGYFQGPATAPLEAVSACTGMFGSGSYPGYPGQTLVDKSTGASYNAHGVNGRRFLLPAMWDPTKSACSALV

SEQ ID NO: 12185 - protein, 429 aa, Burkholderia cepacia R18194
MSNYLNSTEAAARLGVSRQTLYAYVSRGLLRAEPGSSHRESRYLAADVDRLADQRARGHKPKEVAKAALNWGSPVLESSITLIDGGRLFYRGVDALELATRASLEDVAALLWRCDEQTAFGRRVPTTPSVLRTLFRHYDNQRAEQALLPLFTVASEDAPTAIWHQSADRHAQGCGDLVRILAACLLRTRIDTAPIHEQCARAWGVGPAGAELIRMALVLCADHELNASSFTGRCIASTNASLRAVVVGGLAGLSGERHGAATARGEALWDELGNKDVEQKMGERLARGDGLPGFGHALYPDGDVRATYLLSRILPRHPQWKRMIDAGSALVGQKPSLDLALVALRRHLRLPVGAAFGLFALGRSIGWIAHGLEQREQSDLIRPRAVYTGTWPDGAGADHARSRGRSGKQQTTQAAAPKDDMLAAFFRNR

SEQ ID NO: 12186 - protein, 380 aa, Vibrio vulnificus CMCP6
MPSSLTKKGELGGAGLRGQSAGSTALCTVGKTGTGLTYRGYDITDLANHAQFEEVAYLLLRGHLPTQQELDAYKTRLIGLRGLPVELKQALELIPASAHPMDVMRTGCSVLGNLEQETDFSQQLDATERMLALFPAIICYWYRFSHDGVRIDTQDQSQDCIGGYFLKMLTGKEPSELHKQVMHCSLILYAEHEFNASTFAARVCASTLSDIHSCVTAAIGTLRGPLHGGANEAAMEMIENWQTPEEAESNILRMLANKEKIMGFGHAIYRESDPRNALIKRWSKALSEAVGDTHLYAVSERVEAVMKREKDLFCNADFFHASAYHFMDIPTKLFTPIFVMSRLTGWTAHVFEQRANNRIIRPSADYIGPDHQDWVPIEQR

SEQ ID NO: 12187 - protein, 462 aa, Erwinia pyrifoliae
  unsure (1)..(462): unsure at all Xaa locations
MMKNVSSAVAVSRNPATGEVFARYPFATIAEVDSALALTNGAFQYWRHSAMSDRVQLLCNVADALRQQARELAEMMTSEMGKPVDQGLAEVEKSARLCEWYAGHGPAFLQREPTLVEGNKAFVDYLPLGPVLSVMPWNFPVWQVLRGAVPILLAGNSYLLKPAPNVMGCALLLQQILTRVGVPEGLFAVVNADNDGVAQAINDRRIAAVTVTGSVRAGAAIAALSGAAIKKCVLELGGSDAFIVLADADIDAAVKGAIAGRFMNNGQLCISAKRIIVEAPVFDAFRDKFVSAVKEMKIGDPRESGTWIGPMARYDLRDELDSQVQATLKEGATLLLGGHVLPGEGNYYAPTVLXDVKPGMTSFAQELFGPVASLIQADNAXHAVAMANDSEFGLGGSMWSRDLAVAQKLASRIETGGVFINSPSFSDPRVPIGGVKKSGFGRELSHFGLREFTNTQTVWMEE

SEQ ID NO: 12188 - protein, 340 aa, Atropa belladonna
MAFRNGSTTTTITTINHPNDASTIPKNGTNITTTLLKNGSTNEFGCIKPGWFSEFSQLWPGEAFSLKIEKLLFQGKSDYQDVMLFESATYGKVLTLDGAIQHTENGGFPYTEMIVHLPLGSIPSPKKVLIIGGGIGFTLFEVFRYPTIENIDIVEIDNVVVDVSRKFFPYLAAGFDDPRVTLVLGDGAAFVKAAQAGYYDAIIVDSSDPIGPAKDLFERPFFEAVAKALRPGGVVCTQAESIWLHMHIIKQIIDNCRQVFKGSVNYAWTTVPTYPTGVIGYMLCSTKGPQVDFRNPVNPIDKKTSHIKSKGPLKFYNSDIHKAAFILPSFARNLMESELD

SEQ ID NO: 12189 - protein, 448 aa, Lotus corniculatus var. japonicus
MVLRKVGKYEIGRTIGEGTFAKVKFAQNTETGESVAMKVLDRNTIIKHNMVDQIKREISIMKLVRHPYVVRLYEVLASRTKIYIILEFITGGELFDKIIRHGRLSEAESRRYFQQLIDGVDYCHSKGVYHRDLKPENLLLDSLGNIKISDFGLSALPEQGVSILRTTCGTPNYVAPEVLSHKGYNGAVADVWSCGVILYVLLVGYLPFDELDLTSLYSKIEKAEYSCPPGFPVGAKTLIHKILDPNPETRITIEQIRNDEWFQRGYVPVSLLEYEDVNLDDVNAVFDDAEEQRANQQCDHEDMGPLMLNAFDLIILSQGLNLAAIFDRGQDSMKYQTRFITQKPAKVVLSSMEVVAQSMGFKTHIRNYKMRVEGLSAKKTSHFSVMLEIFEVAPTFYMVDIQKAAGDAGEYLKFYKNFCGNLEDIIWKPPHESTKSKVSKTRSKRRSR

SEQ ID NO: 12190 - protein, 205 aa, Glycine max
  unsure (1)..(205): unsure at all Xaa locations
MATYSWSTEIFSFLVLTLLSTSSHTMVAGARNLLESTLSKPEVPTLPKPHELPPLPEIPELPKFESPKIPALPKPELPKVPELSKPDMSKVPELPKVPERLKVPEISKIXEXPKPELPKXXEXXKXELXXXPXIPKVPEFPXPELPKVPEVPKPELSKVPKLPKSELPKVPEIPELPKSELPKIPEIPKVPEFPKVPKAFSTTNP

SEQ ID NO: 12191 - protein, 338 aa, Hyoscyamus niger
MEVISNHNNGSTTKIILKNGSICNGNVNGNSHSNEKTENKLVECTNSIKPGWFSEFSALWPGEAFSLKIEKLLFQGKSDYQDVMLFESATYGKVLTLDGAIQHTENGGFPYTEMIVHLPLGSIPSPKKVLIIGGGIGFTLFEVSRYSTIEKIDIVEIDDVVIDVSRKYFPYLAAGFDDPRVTLIVGDGAAFVKAAQPGYYDAIIVDSSDPIGPAKDLFERPFFEAVTKALRPGGVVCTQAESIWLHMHLIKQIIANCRQVFKGSVNYAWTTVPTYPTGVIGYMLCSTEGPEVNFKNPVNSIDKDTTHVKSKGPLKFYNSDIHKAAFILPSFARDLVEF

SEQ ID NO: 12192 - protein, 376 aa, Halobacterium sp. NRC-1
MSDELKKGLEDVLVAESDLSFIDGDAGKLVYCGYAIEDLARTASYEEVLYLLWHGDLPTRSELDAFRADMASHREIDDDVLALVENLAAADADPMAALRTAASALSAHDDTAGGSDPDDARESGKRITAKLPTIVAAFTRLRNGDDVVAPRDDLGHAANFLYMLNGEAPDDVLADVFDQALVLHADHGLNASTFSGMVTASTLADVHAAVTSAIGTLSGSLHGGANANVMRMLKEVDDSDKDPLSWVQDALANGERVMGFGHRVYNVKDPRAHILSERSEELGAAAGDTKWYEMSVAIEDYMADEKGLAPNVDFYSASTYYQMGIPVDIYTPIFAMSRVGGWVGHVLEQYDDNRLIRPRARYVGAEDRDSTPLDER

SEQ ID NO: 12193 - protein, 336 aa, Atropa belladonna
MEVNHNNGSTTKIILKNGSICNGDVNGNSHTHKKIENKLVECTNSIKPGWFSEFSALWPGEAFSLKIEKLLFQGKSDYQDVMLFESATYGKVLTLDGAIQHTENGGFPYTEMIVHLPLGSIPSPKKVLIIGGGIGFTLFEVSRYPTIDTIDIVEIDDVVVDVSRKYFPYLAAGFDDPRVTLIIGDGAAFVKAAQPGYYDAIIVDSSDPIGPAKDLFERPFFEAVAKALRPGGVVCTQAESIWLHMHLIKQIIANCRQVFKGSVNYAWTTVPTYPTGVIGYMLCSTEGPEVNFKNPVNSIDKDTSHVKSKGPLKFYNSDIHKAAFILPSFARDLVEF

SEQ ID NO: 12194 - protein, 377 aa, Candida albicans SC5314
MSADGEFTRTQIFGTVFEITNRYTELNPVGMGAFGLVCSAVDRLTGQNVAVKKVMKPFSTSVLAKRTYRELKLLKHLKHENLITLDDIFISPLEDIYFVNELQGTDLHRLLNSRPLEKQFIQYFTYQIMRGLKYIHSAGVIHRDLKPSNILINENCDLKICDFGLARLQDPQMTGYVSTRYYRAPEIMLTWQKYDTEVDLWSVGCILAEMIEGKPLFPGKDHVHQFSIITELLGSPPADVIDTICSENTLRFVQSLPHRDPIPFSERFASCTHVEPEAIDLLAKLLVFDPKKRISAVEGLTHPYMEAYHDPTDEPVCESKFDWSFNDADLPVDTWRVMMYSEILDFHQTVGVANETEGSEQPDSQVEQNNLDSANGA

SEQ ID NO: 12195 - protein, 161 aa, Oryza sativa (japonica cultivar-group)
MQEEFQLALFKNKRKENLFANRIFDLFDVKKRGVIDFGDFVRALNVFHPNIPMEEKIDFSFKLYDMDNTGFIERKEVKQMLIALLGESEMRLSDEIIETILDKTFSDADTNQDGRIDRTEWENFVSRNPSLLKIMTLPYLKDITTTFPSFVFNSEVDDLVT

SEQ ID NO: 12196 - protein, 406 aa, Zea mays
  unsure (1)..(406): unsure at all Xaa locations
MASNGCNGNGNGNGNGKAAPAGVVVPEIKFTKLFINGEFVDAASGKTFDTRDPXYQGYTLKEPIGVVGVIIPWNFPTMMFFLKVSPALAAGCTVVVKPAEQTPLSALYYAHLAKMAGVPDGVINVVPGFGPTAGAALASHMDVDSVAFTGSTEVGRLIMESAARSNLKTVSLELGGKSPLIIFDDADVDMAVNLSRLAVFFNKGEVCVAGSRVYVQEGIYDEFVKKAVEAARSWKVGDPFDVTSNMGPQVDKDQFERVLKYIEHGKSEGATLLTGGKPAADKGYYIEPTIFVDVTEDMKIAQEEIFGPVMSLMKFKTVDEVIEKANCTRYGLAAGIVTKSLDVANRVSRSVRAGTVWVNCYFAFDPDAPFGGYKMSGFGRDQGLAAMDKYLQVKSVITALPDSPWY

SEQ ID NO: 12197 - protein, 500 aa, Zea mays
MSSSPSFGLLAVAALLLALSLAQHGSLAATVGPRVIVVGAGMSGISAAKRLSEAGITDLLILEATDHIGGRMHKTNFAGINVELGANWVEGVNGGKMNPIWPIVNSTLKLRNFRSDFDYLAQNVYKEDGGVYDEDYVQKRIELADSVEEMGEKLSATLHASGRDDMSILAMQRLNEHQPNGPATPVDMVVDYYKFDYEFAEPPRVTSLQNTVPLATFSDFGDDVYFVADQRGYEAVVYYLAGQYLKTDDRSGKIVDPRLQLIKVVREIKYSPGGVTVKTEDNSVYSADYVMVSASLGVLQSDLIQFKPKLPTWKVRAIYQFDMAVYTKIFLKFPRKFWPEGKGREFFLYASSRRGYYGVWQEFEKQYPDANVLLVTVTDEESRRIEQQSDEQTKAEIMQVLRKMFPGKDVPDATDILVPRWWSDRFYKGTFSNWPVGVNRYEYDQLRAPVGRVYFTGEHTSEHYNGYVHGAYLSGIDSAEILINCAQKKMCKYHVQGKYD

SEQ ID NO: 12198 - protein, 426 aa, Lotus corniculatus var. japonicus
GRVLGQGNFAKVYHGRNLATNENVAIKVIKKEKLKKDRLVKQIKREVSVMRLVRHPHIVELKEVMATKGKIFLVMEYVKGGELFTKVNKGKLNEDDARKYFQQLISAVDFCHSRGVTHRDLKPENLLLDENEDLKVSDFGLSALPEQRRDDGMLVTPCGTPAYVAPEVLKKKGYDGSKADIWSCGVILYALLSGYLPFQGENVMRIYRKAFKAEYEFPEWISPQAKNLISNLLVADPEKRYSIPEIISDPWFQYGFMRPLAFSMKESAVGEDSTIDHFGGEEEEVPELVAAMGKPARPFYNAFEIISSLSHGFDLRSLFETRKRSPSMFISKYSASAVVAKLEGMAKKLNFRVTGKKEFTVRMQGMKEGRKGKLAMTMEVFEVAPEVAVVEFSKSAGDTLEYVKFCEEQVRPSLKDIVWSWQGDSN

SEQ ID NO: 12199 - protein, 291 aa, Saccharomyces cerevisiae
LVHVASVEKGRSYEDFQKVYNAIALKLREDDEYDNYIGYGPVLVALAWHISGTWDKHDNTGGSYGGTYRFKKEFNDPSNAGLQNGFKFLEPIHKEFPWISSGDLFSLGGVTAVQEMQGPKIPWRCGRVDTPEDTTPDNGRLPDADKDAGYVRTFFQRLNMNDREVVALMGAHALGKTHLKNSGYEGPWGAANNVFTNEFYLNLLNEDWKLEKNDANNEQWDSKSGYMMLPTDYSLIQDPKYLSIVKEYANDQDKFFKDFSKAFEKLLENGITFPKDAPSPFIFKTLEEQGL

SEQ ID NO: 12200 - protein, 427 aa, Escherichia coli O157:H7
MADTKAKLTLNGDTAVELDVLKGTLGQDVIDIRTLGSKGVFTFDPGFTSTASCESKITFIDGDEGILLHRGFPIDQLATDSNYLEVCYILLNGEKPTQEQYDEFKTTVTRHTMIHEQITRLFHAFRRDSHPMAVMCGITGALAAFYHDSLDVNNPRHREIAAFRLLSKMPTMAAMCYKYSIGQPFVYPRNDLSYAGNFLNMMFSTPCEPYEVNPILERAMDRILILHADHEQNASTSTVRTAGSSGANPFACIAAGIASLWGPAHGGANEAALKMLEEISSVKHIPEFVRRAKDKNDSFRLMGFGHRVYKNYDPRATVMRETCHEVLKELGTKDDLLEVAMELENIALNDPYFIEKKLYPNVDFYSGIILKAMGIPSSMFTVIFAMARTVGWIAHWSEMHSDGMKIARPRQLYTGYEKRDFKSDVKH

SEQ ID NO: 12201 - protein, 215 aa, Methanococcus maripaludis S2
MKFFLDTANVEKIKEFNALGLVDGVTTNPSLIKKEGRDFYEVIKEICSIVDGPVSAEVIALDSEGMVKEARELVKLAENVVVKIPMTKEGMKAVNILSKEGIKTNVTLIFSANQALLAAKAGASYVSPFVGRLDDVGQDGMFLISEVMQVFGAYGIETEVIVASVRHPIHVLESAKMGADIATIPFDVLDKLFNHPLTDNGIAKFLSDWEAHMNR

SEQ ID NO: 12202 - protein, 160 aa, Zea mays
MDARMFGLENPLVAALHHLLDVPDGDAGAGGDKAGGGATRTYVRDARAMAATPADVKELAGAYAFVVDMPGLSTGDIRVQVEDERVLVISGERRREEREDAKYLRMERRMGKFMRKFVLPDNADVDKVAAVCRDGVLTVTVEKLPPQEPKKPKTIEIKVA

SEQ ID NO: 12203 - protein, 502 aa, Zea mays
MATANGSSKGSFEVPKVEVRFTKLFIDGKFVDAVSGKTFETRDPRTGEVIASIAEGGKADVDLAVKAAREAFDNGPWPRMTGYERGRILHRFADLIDEHVEELAALDTVDAGKLFAVGKARDIPGAAHLLRYYAGAADKVHGATLKMAQRMHGYTLKEPVGVVGHIVPWNYPTTMFFFKVGPALAAGCAVVVKPAEQTPLSALFYAHLAREAGVPAGVLNVVPGFGPTAGAAVAAHMDVDKVSFTGSTEVGRLVMRAAAESNLKPVSLELGGKSPVIVFDDADLDMAVNLVNFATYTNKGEICVAGTRIYVQEGIYDEFVKKAAELASKSVVGDPFNPSVSQGPQVDKDQYEKVLRYIDIGKREGATLVTGGKPCGDKGYYIEPTIFTDVKDDMTIAQDEIFGPVMALMKFKTVEEVIQKANNTRYGLAAGIVTKNIDVANTVSRSIRAGAIWINCYFAFDPDAPFGGYKMSGFGKDMGMDALDKYLQTKTVVTPLYNTPWL

SEQ ID NO: 12204 - protein, 102 aa, Brassica napus
  unsure (1)..(102): unsure at all Xaa locations
SPSSSSSDDVAAPLLPKSHGXDEVAYDEFNGASFSGAVFNLATTIIGAGIMALPATMKILGLVLGIAMIVVMAFLTDASIEFLLRFSKIKRSRSYGGLMGDS

SEQ ID NO: 12205 - protein, 178 aa, Glycine max
  unsure (1)..(178): unsure at all Xaa locations
MASSMISSPAVTTVNRAGAGMVAPFTGLKSMAGFPTRKTNNDITSIASNGGRVQCMQVWPPVGKKKFETLSYLPDLDDAQLAKEVEYLLRKGWIPCLEFELEHGFVYREHNRSPXYYDGRYWTMWKLPMCGYTDAAQILNKLQYANTTYPNSFIRIIIFHNIPQIQCISLITYKHPSF

SEQ ID NO: 12206 - protein, 119 aa, Triticum aestivum
MSAVNITNVAVLDNPTAFLNPFQFEISYECLVPLDDDLEWKLTYVGSAEDETYDQQLESVLVGPVNVGTYRFVFQADPPDPLKIREQDIIGVTVLLLTCSYVGQEFMRVGYYVNNDYDE

SEQ ID NO: 12207 - protein, 117 aa, Streptococcus constellatus subsp. pharyngis
MTKIYDFSIFDQNNRSISLEIYKGNVLLIVNTATGCGLTPQYKGLQHLYTRYQNQGFEILDFPCNQFMGQAPGTAEEINRFCSLHYQTTFPRFAKVKVNGKEADPLYIWLKEQQAGP

SEQ ID NO: 12208 - protein, 505 aa, Xanthobacter autotrophicus
MNKPEIAITKQSPFKARYGNFIGGKFVEPVGGRYFDNTSPVTGGKICEIARSDADDIEKALDAAHAAKDAWGKTSAAVRALILNRIADRMEENLDLLALAETWDNGKPIRETTAADMPLAIDHFRYFAGAVRAQEGGISEIDHDTVAYHFHEPLGVVGQIIPWNFPILMAVWKLAPALAAGNCVVLKPAEQTPASILVLAELIADLLPPGVLNIVNGFGLEAGKPLASSSRIAKIAFTGETTTGRLIMQYASQNLIPVTLELGGKSPNIFFADVVAEDDDFFDKAVEGFVMFALNQGEVCTCPSRALIQESIYDRFMEKALKRVAAIVQGSPLDPATMIGAQASSEQLEKILSYIDIGKQEGAEVLIGGERNTFGGDLAGGYYVKPTVFKGHNKMRIFQEEIFGPVVSVTTFTDDAEALHIANDTLYGLGAGVWTRDGNRAYRFGRAIQAGRVWTNCYHAYPAHAAFGGYKQSGIGRENHKMMLDHYQQTKNMLVSYSPKKLGFF

SEQ ID NO: 12209 - protein, 148 aa, Triticum aestivum
  unsure (1)..(148): unsure at all Xaa locations
MEGRMFGLETPLMAALQHLLDIPDXPTRAYVRDARAMAATPADVKELPGAYAFVVDMPGLGSGDIKVQVEDERVLVISGERSREEEEDPKYLRMEPRMGKLMRKFVLPENADMEKISPACRDGVLPVPVEKLPPPEPKKPKPIQVQVA

SEQ ID NO: 12210 - protein, 146 aa, Rosa hybrid cultivar 'Vivaldi'
DATTHKFKGKTVMTESERYESLRHCKWVDEVIPDAPWVVNEEFLDKHNIDYVAHDSLPYADASGAGKDVYEFVKAVGRFKETKRTEGISTSDIIMRIVKDYNQYVLRNLDRGYTRKELGVSFVKEKRLRVNMRVKKLQEKVKEKKK

SEQ ID NO: 12211 - protein, 112 aa, Bartonella vinsonii subsp. berkhoffii
ANEACLKMLLEIGSVKRIPEFIARAKDKNDPFRLMGFGHRVYKNYDPRAKIMQKTCHEVLKELNIQNDPLLDIAIELEKIALNDEYFVEKKLYPNVDFYSGITLKALGFPTE

SEQ ID NO: 12212 - protein, 416 aa, Escherichia coli
MESKVVVPAQGKKITLQNGKLNVPENPIIPYIEGDGIGVDVTPAMLKVVDAAVEKAYKGERKISWMEIYTGEKSTQVYGQDVWLPAETLDLIREYRVAIKGPLTTPVGGGIRDLNVALRQELDLYICLRPVRYYQGTPSPVKHPELTDMVIFRENSEDIYAGIEWKADSADAEKVIKFLREEMGVKKIRFPEHCGIGIKPCSEEGTKRLVRAAIEYAIANDRDSVTLVHKGNIMKFTEGAFKDWGYQLAREEFGGELIDGGPWLKVKNPNTGKEIVIKDVIADAFLQQILLRPAEYDVIACMNLNGDYISDALAAQVGGIGIAPGANIGDECALFEATHGTAPKYAGQDKVNPGSIILSAEMMLRHMGWTEAADLIVKGMEGAINAKTVTYDFERLMDGAKLLKCSEFGDAIIENM

SEQ ID NO: 12213 - protein, 506 aa, Xanthobacter autotrophicus
MNSPAFLSSAHTSPFKPRYGNFIGGTFVEPVSGRYFENTSPITGKVICEVPRSDEHDIERALDAAHAAKKAWGRTSAADRALVLLKIADRLEANLELLAGAETWDNGKPIRETTLADIPLAIDHFRYFAACVRAQEGTLGEIDHDTIAYHYHVPLGVVGQIIPWNFPILMAAWKLAPALGAGNCVVLKPAEQTPASILVLAELIADLLPPGVLNIVNGFGLEAGKPLASSPRISKIAFTGETGTGRLIMGYAAQNLIPVTLELGGKSPNIFFADVAAEDDDFLDKAVEGFVMFALNQGEVCTCPSRALVQESIFDKFMEKALARVAAIKQGSPLDPSTMIGAQASSEQMHKILSYIDIGRAEGAQVLAGGERNVLTGELADGFYVKPTVFLGKNNMRIFQEEIFGPVVSVTTFKDEEEALHIANDTLFGLGAGLWTRDGSRAYRVGREIEAGRVWTNCYHAYPAHAAFGGYKQSGIGRETHKMMLDHYQQTKNLLVSYSPKKLGFF

SEQ ID NO: 12214 - protein, 327 aa, Fusobacterium nucleatum subsp. vincentii ATCC 49256
MEIEKMEKKLAILTSGGDAPGMNAAIRATAKIAESYGFEVYGIRRGYLGMLNDEIFPITGRFVSGIIDKGGTVLLTARCEEFKQARFREIAANNLKKKGIEYLVVIGGDGSYRGANLLYKEHGIKVVGIPGTIDNDICGTDFTLGFDTCLNTILDAMSKIRDTATSHERTILIQVMGRRAGDLALHACIAGGGDGIMIPEMDNPIEMLALQLKERRKNGKLHDIVLVAEGVGNVFEIEEKLRGHINSEIRSVVLGHIQRGGTPSGRDRVLASRMAAKAVEVLSKGEAGVMVGIEKNEMVTHTLEKACSVEKRKSIEKDYELALLLSK

SEQ ID NO: 12215 - protein, 327 aa, Triticum aestivum
MASRTAAVPEVALRSGDARPMPAIGMGTAQSPVVPDTTVKAVLEAVEVGYRHFDTASMYATERPLGEALAEAVRRGLLASREEVFVTSKLWCTQCHPHLVLPSLQESLQNLQMEYVDLYLIHWPISLKPGPVVFPVKREDAVPFDLEGVWRAMEECHRLGLAKAIGVSNFTTRHLDKLLPAATVPPAVNQVEMNPVWQQRKLREYCAEKGIHVAAYSPLGGQNWSGDGNAVLDSEVLAEIAKARGKSVAQVALRWIYEQGVTPIVKSFSKERLKENLGIFDWGLTDDDLRKIGQIPQKKIVKAETVLFSAEGEFTSADLADMEIVED

SEQ ID NO: 12216 - protein, 483 aa, Zea mays
MANNSSYGENARRKPHTPSAIVIGGGFAGLAAADALRNASFQVILLESRDRIGGRVHTDYSFGFPVDLGASWLHGVCEENPLAPIIGRLGLPLYRTSGDDSVLFDHDLESYALYDTNGRQVPQELVEKLGKVFEKILEETGKLREEINEDMSIAKAIAIVMARNPHLRQEGIAHEVLQWYLCRMEGWFATDADSISLQGWDQEVLLPGGHGLMVRGYRPVINTLAKGLDIRLNHKVVEIVRHRNRVEVTVSSGQTFVADAAVVTVPLGVLKAKTIRFEPRLPEWKEEAIRELTVGVENKIVLHFGQVFWPNVEFIGVVSSSTYGCSYFLNLHKATGHPVLVYMPAGRLARDIEKTSDEAAAQFAFSQLKKILPNAAEPINYLVSRWGSDENTLGSYTFDGVNKPRDLYEKLRIPVDNLFFAGEATSVKYTGTVHGAFSTGVMAAEECKMRVLERFRELDMLEMCHPAMGEDSPVSVPLLISRL

SEQ ID NO: 12217 - protein, 139 aa, Ustilago maydis 521
MSSGVKVSQECLDKFQELKLGKKIKYIIYSLNDKNTEIVVQNTSTSTSYDDFLAELPPTECRYAIYDFEYEKGDAGKRNKICFFSWSPDDAKIKPKMVFASSKDALRKALVGISTEIQGTDFSEVSYDTVLDKVSRSTF

SEQ ID NO: 12218 - protein, 135 aa, Haloarcula marismortui ATCC 43049
MSDRDPFSEIERAFDMLGEQFGVDMGAIPVDVLDKGDAFLVHADLPGYDSEDIDVQLVEDRKLTISATSSQERESTDGQYVQRERRQQSLSRSVRLPEAVDDGETTASYDSGVLTVRLAKVGHNEDDDGTDIPVN

SEQ ID NO: 12219 - protein, 397 aa, Lotus corniculatus var. japonicus
LKKERLVKQIKREVSVMRLVRHPHIVELKEVMATKTKIFMVVEYVKGGELFAKLTKGKMTEVAARKYFQQLISAVDFCHSRGVTHRDLKPENLLLDDNEDLKVSDFGLSSLPEQRRSDGMLLTPCGTPAYVAPEVLKKKGYDGSKADIWSCGVILYALLCGYLPFQGENVMRIYSKSFKADYAIPEWISPEAKNLISKLLVVDPEKRYSIDEIMRDPWFEIGFMRPLAFSMKASAVDDTVIDFNDDVVEDLDPKSDVGGGEFVEAARPSYNAFEIISSLSHGFDLRNLFETRKRSPSTFISKLSASAVVAKLEAVAKKLNLRITGKKEFMVRMQGVTEGRKGKVGMTVEVFEVAPEVAVVEFSKNAGDTLEYIKLCEDQVRPSLNDIVWSWQGQGSS

SEQ ID NO: 12220 - protein, 127 aa, Bordetella parapertussis 12822
MALSKAEILDAIAGMSVLELSELIKEMEEKFGVSAAAAAVAVAAPAAGGAGAAAAEEQTEFTVVLLEAGANKVSVIKAVRELTGLGLKEAKDLVDGAPKPVKEALPKADAEAAKKKLEEAGAKVEVK

SEQ ID NO: 12221 - protein, 346 aa, Rhodococcus erythropolis
MTTVEVPHSSRSAVLTVSGVIEETSDARSLVFEIPAELKDKFDYKPGQFLTLRIPSDQTGSVARCYSLASSPFTDDAPKVTVKRTVDGYGSNWLCDKLQVGDTIEVLPPSGVFTPKSLDHDFLLFGAGSGITPVISILKSALTQGSGNVVLIYANRDEKSVIFGAELRELAAQHPGRLTVVHWIETVQGLPAVSQLATLAKPFVAYEAFMCGPGPFMDAVHKALAEAGMPRTQVHAEVFNSLAGDPFRDVEVAEVSDEEAADAATVEVELDGETHTLVWPRKQTLVDIMLAKGLDVPYSCKEGESGSCACTVTEGEVQMDNSEILDAEDVANGYILGCKRSRSPIA

SEQ ID NO: 12222 - protein, 499 aa, Rhodospirillum rubrum
MTQAAPPIDWTARARALRLPNHALIDGAPASAGDGATFDCVSPIDGRVLTRVAACGAADVDRAVAAGRAAFEDRRWCGLSPAARKKILLAFAERIEAHRDELALLETLDMGKPIADSLAVDVPATARCLRWYAEALDKVYGEVAPTGDDVLATITREPLGVVGVVVPWNFPMIMAAWKIAPALAAGNSVVLKPAEQSPLTAIRLGELALEAGLPAGVLNVVPGLGPVTGRAIGLHPDIDGAFFTGSTAVGKLFLSYSSQSNMKRLGLECGGKSAHIVLASCKNTTAAAQAAASAIFFNQGEMCTAGSRLIVERAIADEVIEKVVAEAAFWRPGPPLDPATRMGALVDAEQTERVLGYIALGQDEGARLATGGSRAMAESGGCYVEPTIFTGVAPTMRIAREEIFGPVLSVITVESADEAVRVANDSDYGLAAAVWSDDVTTLHRVAKRLRAGMVYANCYDADDITVPFGGFKQSGIGRDKSLHAIDKYTELKTTWLRLG

SEQ ID NO: 12223 - protein, 440 aa, Candida albicans SC5314
MPSIDNDAGASTVSSSISLVKTIIGAGLLSMPLAYSTDGIIFGTFIILLAAFTSGFGLFLQCYVSRYVPVKHATFFNLCSITYPHLSVVFDFAIAVQCFGCAVSYLVLIRDLMPTIVTYVPYIDEKHYPSFWLLVSTVLTIPLSFLKNLDSLKYSSILGLVAIFYMTILVIGHYFAGDIERQGQITLFPTSVTGVFSTFSIIVFAFTGHQNMFSIINEARDKSLTSLTKLVNFAIGISSLLFIAVGLSGYLTFGQDVDGNVILSYPNGLTTTIGRFCIVFMVTFSFPLMIHPARISINNIYHWVTTNYFDKDEANESTALLGNESQESQIAEDEEQGKTHLSHVVPFPHKHFVIVTTSLLIIGYLLAISIKSFALILAIVGASGSTSISFILPGLFGYKLIGSESDDPSTLEVAFKNLSLGLTFWGVAVMILCLYSSLTL

SEQ ID NO: 12224 - protein, 486 aa, Vibrio parahaemolyticus RIMD 2210633
MEMKTHYIDGAMYIGCSEEHFTTYNPANGEPLANIKQANQSDMEAAIESAKRGFEVWSAMTAIERSRILNKAVAILRERNDELAALEVADTGKPIQEAIAVDITTGADVIEYYAGLAPSLQGEQQPLNENQFFYTRREPLGICAGIGAWNYPIQIAMWKSAPALAAGNAMIFKPSEETPLTALKLAEIYSEAGLPDGVFNVVQGDYRVGQMLTAHPDIAKVSFTGESGTGKVVMGDSAKTLKQVTMELGGKSPLIVFDDAKLDDAVSAAMVANFYTQGEVCTNGTRVFVHESIYDDFVAQLKTRTEKLVVGDPLDENTQIGALISKEHESKVLSAIESAKASGATLLTGGYKVTDNGLQNGNFVAPTVFIDCDDSMSHVQQEIFGPVMSVLKFSEEAEVIERANDTDYGLAAGVFTQNLSRAHRVIHKIQAGICWVNAWGDSPAEMPVGGYKQSGIGRENGVETLKHYTQTKSVLVQLSDFESPYA

SEQ ID NO: 12225 - protein, 500 aa, Magnaporthe grisea 70-15
MISRPVLYAITMAMSAMTASAGPCSSDPCAALSAAGLQDPILRPNSTAYQDRINTLWSASARLAPACIVTPKDANEVALVLKALQKTPKAKFAIRGRGHSHWAGGDNVDGGVQIDLSLHFVGVTYNPDTKLASVLPASRWGTVFEELERQHGVAVVGGRDGNLGIGGFLTGGGNSFHTAKYGFGCDNVVNAEVVLADGRIVNVNKDENADLFKALKGGWGNFGIVTRFDLFTFPSSPVWGGLRVATLSQGAAVADSMVNFTANYHKNRGSAYLINWTYSPSMGKDPVISLFLVDTEGVEKGPAFAEALKIPEIMDALSVNRLDNLVDTYALPAGKRHVWYTLTFANDARVVNKAAELNTVFVADLLKVVPAEQLGTQLLVQPMPKIFFEHGVEKGGNVMGMDRVDGDSLQLLIACTVETAEQEKFLHERSAKLKDDVAAFAKSIGALRDWEYLNYADPTQDPFDSYGAANVAFLKQVSAKYDPTGFFQKQQGGGFRLPKA

SEQ ID NO: 12226 - protein, 141 aa, Neurospora crassa
MQNSMSQAYAAPPSIPNTSTEKPHYDAPTAATAGTTYPQADPTTGATAAAGTTPATNRPTTASTYGNEKSVATTPAVTKTRFGASDIILFILAIFIPPLAVFLDRGFKVDFWINILLTILAWFPGVIHAWYVLFRHPTGRD

SEQ ID NO: 12227 - protein, 397 aa, Synechococcus elongatus PCC 7942
MAANLLEQLRGMTVVVADTGDIQSIATFTPRDATTNPSLITAAAQMPQYQSIIDDTLRQVRTELGAEAPVEAIVAEAIDELFVAFGLRILEIVPGRVSTEVDARLSYDTEATIAKARKLIGLYERAGIRRDRVLIKIASTWEGIRAAEVLEKEGIHCNLTLLFGFHQAVACAEAGVTLISPFVGRILDWYKKESGRDAFPGAEDPGVQSVTQIYNYYKKFGYATEVMGASFRNISEIIELAGCDLLTISPGLLEELRQTEALLERKLDPAIAESLELEQIHLDRDRFAELHQADRMANEKLDEGIRGFCKAIDTLEGLLKQRLAVLEGKAVFHHAAHEVFSVCDLDGDGFITREEWLGSDAVFDALDLNKDGKLNEEDLLAGLGATLQMAGRAVATV

SEQ ID NO: 12228 - protein, 372 aa, Bacillus subtilis subsp. subtilis str. 168
MEEKQHYSPGLDGVIAAETHISYLDTQSSQILIRGYDLIELSETKSYLELVHLLLEGRLPEESEMETLERKINSASSLPADHLRLLELLPEDTHPMDGLRTGLSALAGYDRQIDDRSPSANKERAYQLLGKMPALTAASYRIINKKEPILPLQTLSYSANFLYMMTGKLPSSLEEQIFDRSLVLYSEHEMPNSTFAARVIASTHSDLYGALTGAVASLKGNLHGGANEAVMYLLLEAKTTSDFEQLLQTKLKRKEKIMGFGHRVYMKKMDPRALMMKEALQQLCDKAGDHRLYEMCEAGERLMEKEKGLYPNLDYYAAPVYWMLGIPIPLYTPIFFSARTSGLCAHVIEQHANNRLFRPRVSYMGPRYQTKS

SEQ ID NO: 12229 - protein, 317 aa, Desulfitobacterium hafniense DCB-2
MAPALAAGCTVVARGSEVAPLSLIELFKCLQDAGIPKGVANSIQGPAAVTTAAMMKHPAVRVVSFTGSTPVGRSLMRQAADGVIRLALELGGNAPFIVFADADIEKAVEGAMIAKFRNNGQSCIGANRFYVHERIYDKFTALFAEKILRMKIGNPTEEVDLDLGPMVNLKDKARIESLIREAEALGAKPLVPKAEVPAEGYYVPPVILENVPESAALAREELFAPVAPLFKFADENEVIEKANSSDMGLAAYVYTNDLSRSIRVTESLKFGIIGLNNALPSVAYAPMGGVKQSGIGREGARIGLEEFMDVKYVATEI

SEQ ID NO: 12230 - protein, 477 aa, Acinetobacter sp. NCIMB9871
MNYPNIPLYINGEFLDHTNRDVKEVFNPVNHECIGLMACASQADLDYALESSQQAFLRWKKTSPITRSEILRTFAKLAREKAAEIGRNITLDQGKPLKEAIAEVTVCAEHAEWHAEECRRIYGRVIPPRNPNVQQLVVREPLGVCLAFSPWNFPFNQAIRKISAAIAAGCTIIVKGSGDTPSAVYAIAQLFHEAGLPNGVLNVIWGDSNFISDYMIKSPIIQKISFTGSTPVGKKLASQASLYMKPCTMELGGHAPVIVCDDADIDAAVEHLVGYKFRNAGQVCVSPTRFYVQEGIYKEFSEKVVLRAKQIKVGCGLDASSDMGPLAQARRMHAMQQIVEDAVHKGSKLLLGGNKISDKGNFFEPTVLGDLCNDTQFMNDEPFGPIIGLIPFDTIDHVLEEANRLPFGLASYAFTTSSKNAHQISYGLEAGMVSINHMGLALAETPFGGIKDSGFGSEGGIETFDGYLRTKFITQLN

SEQ ID NO: 12231 - protein, 224 aa, Oceanobacillus iheyensis HTE831
MNEQDKLKKAVGEKAATMVKDGMKVGLGSGSTVYWMIRSLGERIQQDGLKIEGIPSSNQTATWAEEAGIPLTDFSNVKELDITIDGADEVDANNHLIKGGGAALFREKIIAQAAKEFVIIVDQSKVVETLGEFSLPVEVLPFSWQRTANEISKLGCVPTVRVHEEEPLVTDNGNYILDCPFKVIPHPDKLNKEIKSIVGVIETGLFIDMATTVIVGEKDNIYIK

SEQ ID NO: 12232 - protein, 287 aa, Staphylococcus epidermidis ATCC 12228
MAIQWYPGHMAKAKRQVSEQLKKVDVVFELVDARIPYSSRNPMIDDVIKQKPRVVILNKKDMTNLKELEKWEIYFKNEGFYPVAVDAKHGKNLKNVEVEAIKATQEKFDREKAKGLKPRAIRAMIVGIPNVGKSTLINKLAKRSIAETGNKPGVTKQQQWIKVGKSLQLLDTPGILWPKFEDEEVGKKLSLTGAIKDSIVHLDEVAIYGLNFMIKHDVSALKRHYNIDTHEDAEILDWFDAIGRRRGLLQKGNEVDYESVIELIINDMRNAKIGTYCFDILKEMKSE

SEQ ID NO: 12233 - protein, 113 aa, Glycine max
RICALQTHRPKVGRIEAMASRLLAAASSSSSSSSPLARLISSRRMAGAADHHGSTKVNMWQEPLNPGNWKEEHFVLTSLAMWGAIIYGGLKVFGGKKEVKTEAGSAPAAAPAH

SEQ ID NO: 12234 - protein, 255 aa, Brassica napus
GDIHGQYQDLLRLFEYGGYPPSANFLFLGDYVDRGKQSLETICLLLAYKIRYPSKIYLLRGNHEDAKINRIYGFYDECKRRFNVRLWKIFTDCFNCLPVAALIDDKILCMHGGLSPELDNLNSIREIQRPTEIPDSGLLCDLLWSDPDQKIEGWADSDRGISCTFGADKVAEFLDKNDLDLICRGHQVVEDGYEFFAKRRLVTIFSAPNYGGEFDNAGALLSVDESLVCSFEIMKPALASSSGHPLKKVPKMGKS

SEQ ID NO: 12235 - protein, 488 aa, Coptis japonica
MEVLSIAIVSFSFLLFLFFILRDSRPKNLPPGPRPSPIVGNLLQLGDKPHAEFAKLAQKYGELFSLKLGSQTVVVASSPAAAAEILKTHDKILSGRYVFQSFRVKEHVENSIVWSECNDNWKLLRKVCRTELFTPKMIESQSEIREAKAREMVKFLRGKEGEVVKIVEVVFGTLVNIFGNLIFSKDVFDLEDPTGGSVELKEHLWKLLDMGNSTNPADYFPIMGKLDLFGQRRAVAEVLQQIYDVWGVMLKERRGTKGSESKNDFVDVLLNAGLDDQKINALLMELFGAGTETSASTIEWAITELTKKPLVVSKIRLELVNVVGDNTVKESDLPHLPYLQAFVKETLRLHPPTPLLLPRRALETCTVMNYTIPKECQIMVNAWAIGRDPKTWDDPLNFKPERFLSSDVDYKGNDFELIPFGGGRRICPGLPLASQFSNLIVATLVQNFEWSLPQGMSTSELSMDEKFGLTLQKDPPLLIVLKARASNI

SEQ ID NO: 12236 - protein, 338 aa, Morganella morganii
MIMKALVLEKAGKIAIQDWQSNEVLGDDDVEIKIHTVGICGSDVHYYQHGRIGPFVVDEPMVLGHEASGVITAAGKNVKHLKVGDRVCMEPGIPDLQSPQSRAGIYNLDPAVRFWATPPIDGCLRESVIHPAAFTFKLPDNVSFAQGAMVEPLAIGMQSATKAGIKPGDIGLVIGAGTIGIITQSALAGGCSDVIICDVFDEKLKVAEKYQGLHAVNSKDQQALADKVRELTGGEGVNVLFECSGAKPVIASISDHIAPGGTAVLVGMPIDPAPLDIVAAQAKEVTFKTILRYANMYPRTIRLLSSGKLNVAPLLSATYKFKDSVEAYERAAEPVRLM

SEQ ID NO: 12237 - protein, 163 aa, Desulfitobacterium hafniense DCB-2
MALSEYMAALAEAKALGLTRQIGVSNFNIELTRQAIEAVGKGEIATNQIELSPYLQSRKLTAFLKEQGIAVTSYMTLAYGKVLKDPVLGQIAAKHHATVAQVALAWALQLGYAVIPSSTKRENLASNLLARDLKLDADDMALIASLERNGREVSPEGLAPVWD

SEQ ID NO: 12238 - protein, 119 aa, Vitis vinifera
MGSSGAVKLACVMVICMVVAAPAAVEATITCGQVASAVGPCASYLQKGGSVPAGCCSGIKSLNSAAKTTVDRQAACKCLKTFSGSIPGINFGLASGLPGKCGVSVPYKISPSTDCSKVT

SEQ ID NO: 12239 - protein, 161 aa, Pseudomonas aeruginosa UCBPP-PA14
MSDSLLSIPCTTIKGEQKTLADFGGKALLVVNTASKCGFTPQYQGLEALWEKYRERGLVVLGFPCNQFGKQEPGDEGEISQFCELNYGVSFPLFRKIEVNGAGAHPLFVSLKKRALGLLGSQGIKWNFTKFLIGRDGQVVKRYAPTTKPEELSSAIEALLE

SEQ ID NO: 12240 - protein, 119 aa, Vitis vinifera
MGSSGAVKLACVMVICMVVAAPAVVEATVTCGQVASALSPCISYLQKGGAVPAGCCSGIKSLNSAAKTTGDRQAACKCLKTFSSSVSGINYGLASGLPGKCGVSVPYKISPSTDCSKVT

SEQ ID NO: 12241 - protein, 490 aa, Glycine max
MESRTKSNPQLTRALCYANDGNQQGRSPSVIVIGGGMAGIAAARSLHDASLQVVLLESRERIGGRIHTDYSFGFPVDMGASWLHGVSNENPLASVIGRLGLPLYRTSGDNSILYDHDLESYGLFDMDGKQVPQELVAKVGEIFEAILQETDKIRQESSEDMSVLRGLSIVFDRKPELRLEGIAYKVLQWYLCRLEGWFAADTDAISLKGWDQEVLLPGGHGLMVRGYLPVVNSLAKGLDIRLGHRVTKVVRRYNGVKVTVENGKTFFADAAVIAVPLGVLKAKKILFEPKLPDWKEAAIADLGIGLENKIILHFENVFWPNVEFLGVVADTPYECSYFLNLHKATGRAVLVYMPSGQLAKDVEKMPDEAAVNFAFMQLKKIFPDASSPIQYLVSRWGSDINSLGSYSYDAVGKPHELYERLRVPVDNLFFAGEATSMSYPGSVHGAYSTGTMAAEDCRMRVLERYGEVDLFQPVMGEEGSMSIPLQISRL

SEQ ID NO: 12242 - protein, 122 aa, Brassica napus
MACLISPVMKLRRLSSADSRRFAYRNLSDDDMEDSVIRVVVGKEKKEFMVEPYVLEETPFRVLIGSAKDRTQSRFNRTGRVVWLDHVDSILFEHLLWLLRNDASSFSDMDVAEIIEFYAQDC

SEQ ID NO: 12243 - protein, 490 aa, Arabidopsis thaliana
MAIIVVTTIFILLSFALYLTIRIFTGKSRNDKSHKLYDYETEIARTKPTFRFLSPGQSEIFTADPRNVEHILKTRFHNYSKGPVGTVNLADLLGHGIFAVDGEKWKQQRKLVSFEFSTRVLRNFSYSVFRTSASKLVGFIAEFALSGKSFDFQDMLMKCTLDSIFKVGFGVELGCLDGFSKEGEEFMKAFDEGNGATSSRVTDPFWKLKCFLNIGSESRLKKSIAIIDKFVYSLITTKRKELSKEQNTSVREDILSKFLLESEKDPENMNDKYLRDIILNVMVAGKDTTAASLSWFLYMLCKNPLVQEKIVQEIRDVTSSHEKTTDVNGFIESVTEEALAQMQYLHAALSETMRLYPPVPEHMRCAENDDVLPDGHRVSKGDNIYYISYAMGRMTYIWGQDAEEFKPERWLKDGVFQPESQFKFISFHAGPRICIGKDFAYRQMKIVSMALLHFFRFKMADENSKVSYKKMLTLHVDGGLHLCAIPRTST

SEQ ID NO: 12244 - protein, 249 aa, Triticum aestivum
  unsure (1)..(249): unsure at all Xaa locations
NQPFYCQTQQPFPQTQQSFPLQPQQPFPXQAQQPFPQPQLPFPQQPEQIIPQQPEQIITQQPFPLQPQQAFPQQPQQPFPQPQQPIPVQPQQPFPQQSQQSQQPFPRPQQLFPELQQPIPQQAQQPFPQQSQQPFPQQPQQPFPLQPQQSFPQQPQQPFPQQPQQPFPLQPQQPFPLRPQQPFSQQPSILQPQQPQQPFLQPQQQLSQQLGQTISQQPQQPFPQQPHQPQQPYPQQQPSGSSLTSIGGQ

SEQ ID NO: 12245 - protein, 224 aa, Zea mays
MASSMLSSAAVVTSPAQATMVAPFTGLKSSAAFPVTRKANNDITSIASNGGRVSCMKVWPPVGKKKFETLSYLPDLTEVELGKEVDYFLRNKWIPCVEFELYHGFGYREHGSTPEYYDGSYWTMWKSPPCWKDWTLLRGLKGSPKMGKTENPNRFSYGKNSGFEKTTPQGSGGSFFFPPKKTTPNFPRGGFIFFCKKPPSKKKTPRRVFFLLSTGAGGVFFSHR

SEQ ID NO: 12246 - protein, 201 aa, Glycine max
  unsure (1)..(201): unsure at all Xaa locations
MSGRVSGKVKWFNDQKGFGFISPDDGSDDLFVHQSQIKSDGFRSLXEGESVEFAIESESDGRAKAVDVTGPDGASVQGTRRGGDGGRSYGGGRGGGGGGYGGGGGYGGGGGYGGGGGYGGGGRGGGGGACYNCGESGHLARDCSGGGGGDRYGGGGGGGRYGGXGGGGRYVGGGGGGGGGGSCYSCGESGHFARDCPSSAR

SEQ ID NO: 12247 - protein, 507 aa, Populus tremula x Populus tremuloides
MACSASDLAPLLSSTVNSTEAATYLCSQFTSISNHLSDTSYAVNNTYLLFSAYLVFAMQLGFAMLCAGSVRAKNTMNIMLTNVLDAAAGGLSYYLFGYAFAFGSPSNGFIGRHFFGLGDFPSPQADYSFFLYQWAFAIAAAGITSGSIAERTQFVAYLIYSTFLTGFVYPVVSHWLWSGDGWANPAKSDNNLLFGSGAIDFAGSGVVHMVGGIAGLWGALIEGPRIGRFDHNGRSVALRGHSASLVVLGSFLLWFGWYGFNPGSFLIILKSYGGGAGGYYGQWSAVGRTAVTTTLAGSTAALTTLFGKRLLSGHWNVIDVCNGLLRGFAAITAGCSVVEPWAAIICGFVAAWVLIGCNKLAEKLQYDDPLEAAQLHGGCGMWGLLFTGLFAKKAYVNEVYSNKPGRPYGLFMGGGGKLLAAQIIEILVIVGWVSATMGPLFYGLHKLKLLRISSEDEMAGMDLTRHGGFAYAYDAEDDVSGKPSFMMRKVLPANNTTPNENSPSINV

SEQ ID NO: 12248 - protein, 486 aa, Pseudomonas putida
MKEIKHFINGAFVGSASGRTFEDINPVNGQVIGRVHEAGRAEVDAAVKAARAALKGPWGKMTVAERADILHRVADGITARFDEFLEAECLDTGKPKSLASHIDIPRGAANFKVFADLLKNVANEAFEMATPDGAGALNYGVRRPKGVIGVISPWNLPLLLMTWKVGPALACGNCVVVKPSEETPLTATLLGEVMQAAGVPAGVYNVVHGFGGDSAGAFLTEHSDVDAYTFTGETGTGETIMRAAAKGVRQVSLELGGKNAGIVFADCDMDKAIEGTLRSAFANCGQVCLGTERLYIERPIFDAFVARLKAGAESLVIGPPDDASSNFGPLVSLKHREKVLSYYQQAVDDGATVVTGGGVPEMPAHLAGGAWVQPTIWTGLSDNSAVVTEEIFGPCCHIRPFDTEEEAIELANSLPYGLASAIWTESSSRAHRVAGQIEAGIVWVNSWFLRDLRTAFGGSKQSGIGREGGVHSLEFYTELKNICVKL

SEQ ID NO: 12249 - protein, 336 aa, uncultured marine gamma proteobacterium EBAC20E09
MIRNLLINLFFLIPVWLIRLVALPFRDVKRNTIFDPQAKFFLALIPKFEIHLIGDQDISKIRNQIHEKRNNLRLSRKIKKNIKTIDHLINQNNSLSLREYVPYKIDNSNVILFFHGGGYVLNSVDTHHDMVCYFSEKLRTRIYSLEYSLAPENKFPKARDESLLALRWLIEQGHNPANISLCGDSAGAHLAVSLSQHLKNNENIKLHSQCLIYPMCDPKCDSESHKIFKHGYLLTHEAMKWFWQKFSSSKLDIEDSTFNLMIEDTTIQQPKTILVTAGFDPLVDEAEEFAFLLHENDNTVIQLHYPSLFHGFASMTRLKSAKLAVDDFLREYKEIL

SEQ ID NO: 12250 - protein, 110 aa, Glycine max
  unsure (1)..(110): unsure at all Xaa locations
KIYCPNVSTVNHAGAGMVAPFTGLKSMADFPTRXTNNDITSIASNGGRVQCMHVWPPDGKNKVDTLPYLPDLDDAQLANEGXYLHTKGWIPSLEYELEHGNVYPEHNMSP

SEQ ID NO: 12251 - protein, 105 aa, Candida albicans SC5314
MNQQNARDIELREQDRWLPIANVARIMKNTLPPTAKVSKDAKECMQECVSEFISFITSEASDKCLKEKRKTINGEDILYSMYDLGFENYAEVLKIYLAKYREARK

SEQ ID NO: 12252 - protein, 224 aa, Oryza sativa (japonica cultivar-group); identical to SEQ ID NO: 275

SEQ ID NO: 12253 - protein, 132 aa, Zea mays
  unsure (1)..(132): unsure at all Xaa locations
MLLSHFQQIRTFIQMRTNLKVVDNSGAKXVMCIQSLRGKKGARLGDMIIGSVKEAQXPRGKVKKGDVVYGVVVRAAMKKGRSDGSEVQFDDNEVVLVNKKGELIGTRVFGPVPHELRKKKHLKILALAEHIV

SEQ ID NO: 12254 - protein, 275 aa, Bordetella pertussis Tohama I
MAQVPVLKLNDGNAMPQLGLGVWQVPNDQAAASVKAALAAGYRSIDTAAIYGNEAGVGEGLRAAGVARKDLFVTTKLWNDRHGYDEAQRAMDESLRKLGLAYVDLFLIHWPVAGSDKFVDAWRAMVAMKEDGRARSIGVSNFTIANLRRLVDETGVVPAVNQVELHPGFAQRELRAFHAEQGIATESWSPLGQGAVMHDATLAGIAARHGKSAAQVTLRWHLQNGLIVIPKSVTPARIQANIDVFDFELSADEMADIDALPEGPRLGPDPATFTG

SEQ ID NO: 12255 - protein, 223 aa, Oryza sativa (japonica cultivar-group)
MAPAAAMAILLLALLMPATLCSRSGPPSSKHGHGGHAKRAPPPASPVVPVAPQAAALVRATCNSTAYYDVCVSALAADPSSTTADVRGLSAIAVSVAAANASGAAQAAAALANGTAPLAAAAAGDGTVQALLRACAGKYGDARDALAAAKESMGQQDYDLATVHVSAGAEYPQVCKALFRRQRPGAYPAELAAREEALNKLCSVALDIIALLTSSPASNNNNS

SEQ ID NO: 12256 - protein, 412 aa, Zea mays
VICLLLAPHSSLPSLPVPLLLLPSPASGVDVTAVLSAFPNFADFARLLASTPVASELSGRSSLTLLAVPNANLPQSPSAFVASAGADIADVLRYHVLLEYLSPFDLARLSPSGKLVTTLFQTTGRAPSDFGAVNLTVGGNSTVVVRSPAPSPGSNATVLGAVTAVPYNLSVLAVGGLIIPSGFDLAASESRPPPPVNITRVLTDARGFNVAASMLQASGVASEFEADEHGAGITVFVPTDDAFAGLPATDRLQSLPAERKAVVLRFHVLHSYYPLGSLESIVNPVQPTLATEHTEAGHFTLNITRVNGSIAIDTGIVQASITRTVFDQNPVAVFAVSKVLLPKEMFGRGDSGNTAMAPPSVAMAPRDAGSEKTPQTRLSSPPDLHSEDSESSASLLTAKGTWWCIGLMYLQL

SEQ ID NO: 12257 - protein, 182 aa, Triticum aestivum
  unsure (1)..(182): unsure at all Xaa locations
APPERPAVDGVLSDLTCDSDGKVDQFIGGRSSLPLHELPAHGTRGYYLGMFLGGAYQEALGGLHNLFGGPSVVRVSQSDGPHCFAVTRAAPGPSCADVLRAMQHEPEVMFEVLKQRTTDDGATAAALARAFGSMPYLSFDAEEAXAMSGAESSGMSSDSEGSAAGAAEDDDEEWEFMRGLTV

SEQ ID NO: 12258 - protein, 342 aa, Methanosarcina mazei Go1
MTKTAAVIKGDGVGPELVDAMLKVAEASGTDVEFVMCEAGAGWWEEHGGNSLIPEETWQILDSSDACFKGPTTTPGGIGSPRSVAVSIRRKYDLYANVRPIKTFPNSSAPLGDVEMVCVREGTEGLYIGEEIQLTDDVSIAIRKITRTASSKIARYAFEDAKKRGYDTVVPIHKSNILKLTCGSFLEEVEKVAHDFPDIEVWPYHIDNIAQQLIKNPQIFNKKVLLSTNLFMDVISEECSALVGSIGLIYSANIGDNFAMFEPAHGSAPKYAGLDKVNPVATVLAGAWMLDYLGEKDKSDAIFKATERVISEGKYVTYDLGGSAKLSQMADEIAKYTEEILK

SEQ ID NO: 12259 - protein, 443 aa, Vibrio parahaemolyticus RIMD 2210633
MSYVFHRHCHATLPIIDKGEGVYLFDKQGKQYLDACGGAAVSNLGHSHQAVKKAMLEQLERVPFAHTGFFTSDSSERLAELICQHMPEQFNHVYLVSGGSEAVESALKMARQYFVESGKPEKKQFIARQQSYHGNTLGALAVGGNEWRREPFKPILHPSHHIAPCYAYRYQQSHESELDYSLRAANELEAKILELGADNVMAFVAEPIVGATAGAVPATQGYFKRIREICDQYDVLLILDEVMCGVGRSGSFFAFEQEEAEPDLVCMAKGLGAGYQPIGAVVANDRVYQAIADGSGFFQHGHTFMAHPVACAAAVATIQTIFQDDLLTAVNRQSALLRNELASALAHLPYIGDIRGKGLFFGIELVADKESKSPLSKATLADKRIKQRAMENGLMCYPMGGTIDGVNGHHILLAPPFIIQSHHIDELVGKLSLTLKEVAEIWK

SEQ ID NO: 12260 - protein, 283 aa, Methylococcus capsulatus str. Bath
MQKEGFLESAYGVRMPGIVYGTAWKKDRTAALVEQAVSLGFRGIDTACQPKHYDEPGVGAGLAACTNAGLERADLYLQSKFTPVDGQDPERMPYDPKASLAEQVARSFESSLKNLRTSYLDCLILHSPLSKEKDTLDVWRAMETVFDGGGARQLGISNCYRPELLERLYRWSRVKPAVVQNRFYAETRYDREIREFCRQNRIVYQSFWTLTANPSILAHATVRALAATHGRTPAQIFFRYLTQIGVVPLTGTASEAHMREDLAIFEFELTPDQCAAVSGLLRT

SEQ ID NO: 12261 - protein, 365 aa, GIBBERELLA ZEAE PH-1
MAHTDVTEVDHTPTEHCEERNETGKPSKDLSASMAHIQIRQSSAEKHGWDEPVPESAPAVSFGHNLERNQESKMAGFPAGVVNIVNGCGAEAGSAITAHPGIDKIAFTGSTITGKTIMKKASETLKSVTLETGGKSPLIVFDDADFEQAVKWSNCGIMGLGNMGQICTATSRIFVQDTIYEKFLEAFHEQVKSSTVIGDPFDENTTHGPQVSKAQYEKILSLIESGKSEGAGLLTGGARSGDKGFYIQPTVFRDVKPNMKIVREEIFGPCFVIAPFSTEADAIERANDTEYGLGAAIFTENLRKAHRVAAGVQAGTVWIDSSQDTHWGVPFGGYKKSGIGRELGSYALSAYTQVKAVHATSQLYG

SEQ ID NO: 12262 - protein, 174 aa, Triticum aestivum
MAPAVMASSATTVAPFQGLKSTAGLPVSRRSSGSLGRVSNGGRIRCMQVWPIEGIKKFETLSYLPPLSTEALLKQVDYLIRSKWVPCLEFSKVGFVFREHNSSPGYYDGRYWTMWKLPMFGCTDATQVLNEVEEVKKEYPDAYVRVIGFDNLRQVQCVSFIAFRPPGCEESGKA

SEQ ID NO: 12263 - protein, 212 aa, Oryza sativa (japonica cultivar-group)
MDEEEHEVYGQEIPEDGDMDGADVDMASGGDDAAKLQELDQMKRRLKEMEEEAAALRDMQAKVAKEMQGGDPSASTAEAKEQVDARSVYVGNVDYACTPEEVQQHFQACGTVNRVTILTDKFGQPKGFAYVEFLEQEAVQEALNLNESELHGRQIKVAPKRTNVPGMKQRPPRGYNPYHGYPYRSYGAPYFPPYGYGRVPRFRRPMRYRPYF

SEQ ID NO: 12264 - protein, 216 aa, Oryza sativa (japonica cultivar-group)
MDEEEHEVYGQEIPEDGDMDGADVDMASGGDDAAKLQELDQMKRRLKEMEEEAAALRDMQAKVAKEMQGGPPGGDPSASTAEAKEQVDARSVYVGNVDYACTPEEVQQHFQACGTVNRVTILTDKFGQPKGFAYVEFLEQEAVQEALNLNESELHGRQIKVAPKRTNVPGMKQRPPRGYNPYHGYPYRSYGAPYFPPYGYGRVPRFRRPMRYRPYF

SEQ ID NO: 12265 - protein, 324 aa, Clostridium thermocellum ATCC 27405
MYEIYALQKGYKRMNPYKRIALKALSHWGRNLKKNYRVYRRFTNVVSVCTGHGCRIADLEVAAGDRNIPVRLFHPDDPALGVLIFFHGGGWVTGNVDSYTHVCSNMANQTKNIVVSVDYRLAPEHPFPSGLEDCYDATREFFKNPGLLNCKADDITLIGDSAGGNLAAAVSLMARDRGEFLPKRQILIYPSTYNDHSENSPFPSIRENGTGYLLTSEEIQNYMDMYAPNIEDRQSPYLAPLLARDLSNQPDTLIITAEYDPLRDEGEAYGMRLKEYGNNVKMYRIKGALHGFFSIPWKSQHVSRSFEIINWFLNSYNGQSEELL

SEQ ID NO: 12266 - protein, 123 aa, Triticum aestivum
  unsure (1)..(123): unsure at all Xaa locations
SKDDSGPCYTYPQRGGAIHTGGHIAIKAHTCQVVEACTYKTAKHGHAMCDFVAIDIFNRKKLDDIVPXCHNCDLPHVVRLDNHLIDITEDGYASLLTESGHTNDDLQLPTDDAVLGQIREWMC

SEQ ID NO: 12267 - protein, 403 aa, Sinorhizobium meliloti
MLTQKTKDIVKATAPVLAQHGYAIIQHFYKRMFQAHPELKDIFNMAHQERGEQQQALARAVYAYAANIENPESLSAVLKDIAHKHASIGVRPEQYPIVGEHLLASIKEVLGDAATDEIISAWAQAYGNLADILAGMESELYGRSEERAGGWAGWRRFIVREKNPESDVITSFVLEPADGGPVADFEPGQYTSVAVQVPKLGYQQIRQYSLSDSPNGRSYRISVKREDGGLGTPGYVSSLLHDEINVGDEPKLAAPYGNFYIDVSATTPIVLISGGVGLTPMVSMLKKALQTPPRKVVFVHGARNSAVHAMRDRLKEASRTYPDFKLFIFYDEPLPTDIEGRDYDFAGLVDVENVKDSILLDDADYYICGPVPFMRMQHDKLLGLGITEARIHYEVFGPDLFAE

SEQ ID NO: 12268 - protein, 431 aa, Cupriavidus necator
MTRTEQIQALQKDWDTNSRWKGIKRNFTAEDVVRLRGSVQVEHTLARPGSEKLWTLLHTEPFVNSLGALSGNQAMQQVKAGLKAIYLSGWQVAGDANLAGEMYPDQSLYPANSVPQVVKPINNTFQPPDQIQWSEGKGDTDFFAPIVADAEAGFGGVLNAFGLMKSMIEAGAAGVHFEDQLASVKKCGHMGGKVLVPTREAVAKLTSGGLGADVLGVPTLVIARTDGEAADLLTSDVDDNDKPFCTGERTVEGFYRVRNGLEQSISRALAYAEVADLVWCEIGKPDLEFAKKFAEAVHAKFPGKMLAYNCSPSFNWKKNLDDATIAKFQRELGAMGYKFQFITLAGFHSLNYSMFNLAYGYARNQMSAFVELQEAEFKAAEKGFTAVKHQREVGTGYFDAVTQTIEGGQSSTTALKGSTEDEQFFEDKKVA

SEQ ID NO: 12269 - protein, 501 aa, Sinapis alba
MSTNKKTIVWFRRDLRIEDNPALAAAAHEGSVFPVFIWCPEEEGQFYPGRASRWWMKQSLAHLRQSLKALGSELTLIKTHSTVSAILDCVRATGATKVVFNHLYDPVSLVRDHTVKEKLVERGISVQSYNGDLCMSPGRYTVKRANLLLVLILTGKKCLDMSVESVVLPPPWRLMPLSAAETVWACSVEELGLENEAEKPSNALLTRAWSPGWSNADKILNEFIEKQLIDYAKNSKKVVGNSTSLLSPYLHFGEISVRRVFQCARMKQIIWARDKNGEGEESADLFLRGIGLRDYSRIICFNFPFTHEQSLLSHLRFFPWDADVDKFKAWRQGRTGYPLVDAGMRELWATGWMHNRIRVIVSSFAVKFLLLPWKWGMKYFWDTLLDADLECDIIGWQYISGSLPDGHELDRLDNPAIQGAKYDPEGEYIRQWLPELARLPTEWIHHPWDAPLTVLKASGVELGTNYAKPIVVIDTARELLTKAISRTREAQIMIGACGDEM

SEQ ID NO: 12270 - protein, 191 aa, Zea mays
  unsure (1)..(191): unsure at all Xaa locations
PREAIDRVYFSETPVEVVKEHDQELSKLGAALIAMXGHVAQAFTLLKSSXEAQSVVAXXXXDKNVWDXVLKNERVMEFYKSHXQXLVNTFXEETGSTDSVESPEKFEEASPEYALPTASPLSDFVDSAKKTMMEMVDNITNFFQDMFHNPAEAEAGPGSSSKKPSFAEMAAGGSFMALAMAVILVVLFKRA

SEQ ID NO: 12271 - protein, 115 aa, Musa acuminata
PGREDKTLPREEGRLPDATKGSDHLRDVFGHMGLSDQDIVALSGGHTVGRCHKERSGFEGAWTSNPLIFDNSYFKELLSSEKDDLIQLPSDKALLTDPVFRPLVEKYAADVNACS

SEQ ID NO: 12272 - protein, 376 aa, Mycobacterium tuberculosis H37Rv
MTKSLPGVADLRLGANHPRMWTRRVQGTVVNVGVKVLPWIPTPAKRILSAGRSVIIDGNTLDPTLQLMLSTSRIFGVDGLAVDDDIVASRAHMRAICEAMPGPQIHVDVTDLSIPGPAGEIPARHYRPSGGGATPLLVFYHGGGWTLGDLDTHDALCRLTCRDADIQVLSIDYRLAPEHPAPAAVEDAYAAFVWAHEHASDEFGALPGRVAVGGDSAGGNLSAVVCQLARDKARYEGGPTPVLQWLLYPRTDFTAQTRSMGLFGNGFLLTKRDIDWFHTQYLRDSDVDPADPRLSPLLAESLSGLAPALIAVAGFDPLRDEGESYAKALRAAGTAVDLRYLGSLTHGFLNLFQLGGGSAAGTNELISALRAHLSRV

SEQ ID NO: 12273 - protein, 384 aa, Methanococcus maripaludis S2
MLNNSVKHLKMDNMENKIPMRRMVHKIIYECNIVLLVVDARDPETTRNRALEEYTIEKNKKLIYVINKSDLVPKKILEKWKNKFKSENPDSSVVFVSAKEKLGTKMLRDEIKTYLNSNNIKYGQVGIVGYPNVGKSSIINALTGKKSARSGLTAGLTVGEQWVKLTKDIKLLDSPGIIEPKDEDELVISGALRYEKADDIISPALKILNRIHTFDNTILKEYYGFEIGEEINIELLEKIGTKLNFLTKDGKIDIDRTSKSIIREFQNGKLNYHRMNLKKYEQKRTKNIDFITKHLKDFPFINDADQIILHLENINELGKLNTRPVIGIKELDDAFVIISFSEKSRDTGRKKVEELARTSDIELYSLGDGRVGKHRIYVGVGEKR

SEQ ID NO: 12274 - protein, 282 aa, Mycobacterium tuberculosis H37Rv
MTGESGAAAAPSITLNDEHTMPVLGLGVAELSDDETERAVSAALEIGCRLIDTAYAYGNEAAVGRAIAASGVAREELFVTTKLATPDQGFTRSQEACRASLDRLGLDYVDLYLIHWPAPPVGKYVDAWGGMIQSRGEGHARSIGVSNFTAENIENLIDLTFVTPAVNQIELHPLLNQDELRKANAQHTVVTQSYCPLALGRLLDNPTVTSIASEYVKTPAQVLLRWNLQLGNAVVVRSARPERIASNFDVFDFELAAEHMDALGGLNDGTRVREDPLTYAGT

SEQ ID NO: 12275 - protein, 640 aa, Zea mays
  unsure (1)..(640): unsure at all Xaa locations
HTGDWKIDESPVDGKKFDRQALEELSKEGVTLMMSDSTNVLSPGRSISESVVAGSLLRHIXGTTRPKGRVITTQFASNIHRIGSIKAAADLTGRKMVFVGMSLRTYLEAAFKDGKAPLDPSTLXIKVEDMDAYAPKDLLVVTTGSQGEPRAALNLASYGGSHALKLSKEDVLLYSAKVIPGNETRVMKMMNRLTDLGPXXIMGKDSGLHTSGHAYREELEEVLRIVKPQHFLPVHGELLFLKEHESLGRSTGIRHTTVIKNGEMLGVSHLRNRRVLSNGFVSLGKEDLQLMYSDGDKAFGTSTDLCVDERLRIASDGIIFVSMEIFRPQKEHGLAQSGLKGKFKITTRCLWLDNGRLLDALYKAAHAALSSCPVNCPLSHMERMVAEILRKMVRKYSGKRPDVIAVATENTTAGFSEHLDAKASGNFGPSSATSHLSRSPATTLEGSYKTHPDNPEVDAEETLPEAARTAPDDATTSSNGEAFFSSDLHQPKTLEHFWESFKSPTAVKIARIVNGGKKQNLGKIGIMGKDSSIQSAPAPAKSSKKNKWKPEEIKSLIQMRGEMNERFQSVKGRMVLWEEISDNMLKQGISRTPAQCKSLWTSLVQKYEESKKDAESMKTWPYFSAMDRILSQQGEMATKG

SEQ ID NO: 12276 - protein, 478 aa, uncultured bacterium 580
MKPKTNIVWLKRDLRLTDHAPLYEATCRDEQFLVLYIYEPSLINDSHTDERHWRFIQQSLSVMEKILAKQSKQLSIAYGEADQIFSEIINQHEITNVFSHEETGLKLTYERDKKLKKIFNAKKIQWHEYQTNAVIRGLNNRKTWEKQWNKVMREEIKTINLAEANIISHNFPNYSIPKFRNDLNYQPGGCLPGQKEMHDFFETRGQDYFKFISKPDRSRTSCSRLSPYIAYGNLSMREVYQTLLKSWNKTGWRRSMAALSSRLHWHCHFIQKYESEIDIEDLPINRGYKDFPYKVINCEHEDFLAWANGETGYPLIDASMRALKKTGYLNFRMRAMVVSFACHYFMIHWKLVAKHLATLFLDFEPGIHYPQIQMQAGVTGINTIRIYNPSKQLQDHDPDTKFIRDWIDELSDQDKEYILGLPDDNFDLFSNSQNFYPTPAYDFFERTKYAKNLLWQWKKSSLVKSYNSKILSRHVKVR

SEQ ID NO: 12277 - protein, 139 aa, Triticum aestivum
  unsure (1)..(139): unsure at all Xaa locations
NCKTFTAVEPIPGLLEWRIIYVGSAKNXEYDQVLEEFXIGPVQEEATMKFTVECPPPDFTRIPRDXLICVTAIIITVSYRAQXFIRVGYYVHNVLNXTLPEEERPNAEPATLIAHTRRTILTDKPRITKFRINWGEHRE

SEQ ID NO: 12278 - protein, 188 aa, Medicago sativa
AWHSAGTFDSKTKTGGPFGTIKHQAELAHGANNGLDIAVRLLEPLKEQFPIISYADFYQLAGVVAVEITGGPEVPFHPGREDKPEPPPEGRLPDATKGSDHLRDVFGKAMGLSDQDIVALSGGHTIGAAHKERSGFEGPWTSNPLIFDNSYFKELLGGEKEGLLQLPSDKALLSDPVFRPLVEKYAAG

SEQ ID NO: 12279 - protein, 420 aa, Glomerella cingulata
MTTNGSDKPQVQPCRYKVGKTLGAGSYSVVKECVHIDTGRYYAAKVINKRLMAGREHMVRNEIAVLKKVSMGHQNILTLVDYFETMNNLYLVTDLALGGELFDRICRKGSYYESDAADLIRATLSAVAYLHDHGIVHRDLKPENLLFRTPEDNADLLIADFGLSRIMDEEQFHVLTTTCGTPGYMAPEIFKKIGHGKPVDVWALGVITYFLLCGYTPFDRDSDFEEMQAILNADYSFTPFDYWRGVSEHAKDFIRKCLTIDPKKRMTAHEALQHPFVAGYLNGEGEGQNLLPTVKKNFNARRTLHAAIDTVRAINKLREGQQNLMDGAKSREPDRGLKSPPNAKKDDSAISMGNTNHKDSGYGTQPEADNQNDVCHDRCGTTPTSVPASLRVRAVSRTRSLRQAKDCGAVPQCDDSLEAV

SEQ ID NO: 12280 - protein, 129 aa, Bifidobacterium longum bv. Infantis
MPTGRVRWFDAAKGYGFITSEEGKDVFLPAQALPTGVTTLRKGAKVEYSVVDGRRGPQAMDVRLIASAPSLVKATRPKADDMAAICEDLIKMLDAAGNTLRRHRYPSAADSKKLATLLRAVADQFDVQD

SEQ ID NO: 12281 - protein, 486 aa, Mycobacterium avium subsp. paratuberculosis str. k10
MADPPALVQTYQLYIDGQWVEPQDGRYDDLSPSTEAVIATAPDASVAQVDDAIAAARRAFDSGPWGRMSAEQRARCLNQLGEALTKHADDFFALSQTEWGCIGNERIMQIDGAGFMSLHAAQLATQLVDQEVAGISAGTTLLRHVPLGVVAVLTPWNFPHCLNVMKLNHALAAGNTVVLKPSPLTPLAGLALARLIDEHTDIPPGVVNVVTPSGVEAAKLLTTDPRIDMVSFTGSSAVGRQVMSAAGDTIKRILLELGGKSASIVLDDANVTDEMLEQMLFQSCSLHAGQACILHSRLLLPDSLHDDVVDRLAALAREVKVGDPTDPDVQMGPLISAAQRDRVEAHIAGARSDGATLVTGGGRPAGLDVGYYVEPTILSGVEPNSTIAQEEVFGPVLSVLRYRDDDDAVAIANNSRYGLSGAVWGDDVDRAVGVARRIRTGQIAVNGISPAGAPFGGFRLSGLGREGGGIGGLHQYMEPMAIGVPA

SEQ ID NO: 12282 - protein, 219 aa, Prunus armeniaca
MEKTECSEAENFGSVTTSLEPQATAKRKKAKSKNQRRFSDEQIRLLESIFEADSKLEPRRKVQVARELGLQPRQVAIWFQNRRARWKSKQIEQDFRTLRADYDNLASRFESLKEEKQSLLMQMQKLNELVGKPSQGLEGNIMVDGSRLQEELEPRGVIQSHKNNTSNDVGCHGDEIHELLSMAHVDASSLSPQDWHRFEPSILFDPSRFTSSHWLNFWT

SEQ ID NO: 12283 - protein, 214 aa, Oryza sativa (japonica cultivar-group)
MEYYEQEEYATVTSAPPKRPAGRTKFRETRHPVYRGVRRRGPAGRWVCEVREPNKKSRIWLGTFATAEAAARAHDVAALALRGRGACLNFADSARLLRVDPATLATPDDIRRAAIELAESCPHDAAAAAASSSAAAVEASAAAAPAMMMQYQDDMAATPSSYDYAYYGNMDFDQPSYYYDGMGGGGEYQSWQMDGDDDGGAGGYGGGDVTLWSY

SEQ ID NO: 12284 - protein, 644 aa, Zea mays
MISARTAAASPASLWKQGGRSEGGGSCDGCRTYRNTLRRAAAAKVRALPSRAVEAVKMGSAAEMEQEEAEVAAAAAGVVVEDHYGEDSATEELPILPWAFSVASGYTLLRDPHHNKGLAFMEKERDAHHLRGLLPPAVVPQELQIKKIMHNLRQYQVPLQRYMAMMDLQERNERLFYKLLIDNVEELLPVVYTPTVGEACQKYGSIFRQPQGLYVSLRDKGKVLEVLRNWPHRNIQVICVTDGERILGLGDLGSQGMGIPVGKLALYTALGGVRPSACLPITIDVGTNNEKLLNDEFYIGLRQKRATGEEYHELMEEFMAAVKQIYGEKVLIQFEDFANHNAFNLLAKYSKSHLVFNDDIQGTASVVLAGLLAALKVVGRTLAEHTYLFLGAGEAGTGIAELIALEISKQTSAPIEECRKKIWLVDSKGLIVDSRKNSVQSFKKPWAHEHEPLTTLYDAVQSIKPTVLIGTSGVGRTFTKEVVEAMASFNERPIIFSLSNPTSHSECTAEEAYNWTQGRVIFASGSPFGPVEYDGKVFVPGQSNNAYIFPGFGLGLVISGAIRVHEDMLLAASEALAAQATQENFDKGSIFPPFTNIRKISARIAAAVAAKAYELGLATRLPPPRDLVKYAQSCMYTPVYRNYR

SEQ ID NO: 12285 - protein, 262 aa, Thermotoga maritima MSB8
MSWYPGHIEKAKRQIKDLLRLVNTVVEVRDARAPFATSAYGVDFSRKETIILLNKVDIADEKTTKKWVEFFKKQGKRVITTHKGEPRKVLLKKLSFDRLARVLIVGVPNTGKSTIINKLKGKRASSVGAQPGITKGIQWFSLENGVKILDTPGILYKNIFSEDLAAKLLLVGSLPVERIEDQRIFERAFEIFARSIGIESSFSEFFEDFARKRGLLKKGGVPDIERALMLFFTEVAQGKAGRVSFERPEDITPVQQEQTRGV

SEQ ID NO: 12286 - protein, 404 aa, Escherichia coli
GKKITLQNGKLNVPENPIIPYIEGDGIGVDVTPAMLKVVDAAVEKAYKGERKISWMEIYTGEKSTQVYGQDVWLPAETLDLIREYRVAIKGPLTTPVGGGIRSLNVALRQELDLYICLRPVRYYQGTPSPVKHPELTDMVIFRENSEDIYAGIEWKADSADAEKVIKFLREEMGVKKIRFPEHCGIGIKPCSEEGTKRLVRAAIEYAIANDRDSVTLVHKGNIMKFTEGAFKDWGYELAREEFGGELIDGGPWLKVKNPNTGKEIVIKDVIADAFLQQILLRPAEYDVIACMNLNGDYISDALAAQVGGIGIAPGANIGDECALFEATHGTAPKYAGQDKVNPGSIILSAEMMLRHMGWTEAADLIVKGMEGAINAKTVTYDFERLMEGAKLLKCSEFGDAIIK

SEQ ID NO: 12287 - protein, 404 aa, ASPERGILLUS NIDULANS FGSC A4
MASQVQPGQKPKVQPCRYKTGKTLGAGSYSVVKECVHIDTGQYYAAKVINKRLMVGREHMVRNEIAILKQVSTGHQNILTLVDYFETMNNLYLVTDLALGGELFDRICRKGSYYESDAADLVRAILSAVAYLHDHGIVHRDLKPENLLFRTPEDNADLLIADFGLSRIMDEEQLHVLTTTCGTPGYMAPEIFDKSGHGKPVDIWAIGVITYFMLCGYTPFDRETNLEEVQAIATANFSFTPVEYWRGVSQEARDFIKRCLTVNPKKRMTAHQALQHPWINPPYDTTDDLGSGEDLLPNIKKNFNARRTLHKAIDTVRAINKLRENGGLMMDGIMSVDPKPEHVNGSEVVEDRTTPRERENEDAMEIDSRSNARGQTEQQIREQERKVKETVAGLWSRTAPRSER

SEQ ID NO: 12288 - protein, 200 aa, Candida albicans SC5314
MATNITWHANLTHQERAELRKQKGVTVWLTGLSASGKSTIACALEQSILARGLNSYRLDGDNIRFGLNKDLGFSEADRNENIRRISEVAKLFSDSCCITVTSFISPYRADRRLARELHEKDNLPFVEVYIDVPLEVAEQRDPKGLYKKAREGIIKEFTGISAPYEAPEKAEIHVKNHSGLSVEQAAEQIIDYLLEKGYIN

SEQ ID NO: 12289 - protein, 231 aa, Triticum aestivum
  unsure (1)..(231): unsure at all Xaa locations
MCGILAVLGCGDESQGKRVHVLELSRRLKHRGPDWSGLHQVADNYLCHQXRLAIIDPASGDQPLYNEDKSIAVAVNGEVYNHEELRARLSGHRFRTGSDCEVIAHLYEEYGESFIDMLDGVFSFVLLDARDNSFIAARDAIGVTPLYIGWGIDGSVWISSEMKGLNDDCEHFEIFPPGNLYSSKEKSFKRWYNPPWFSEVIPSVPYDPLRLRSAFEKAVIKRLMTDVPFGV

SEQ ID NO: 12290 - protein, 1230 aa, Cryptococcus neoformans var. grubii
MNGFMPALRLHHTHSSSVSPTASNDAASSSPTSSQPHQLAAYSPLYATSPNRGSKITKGSSLSSSTAHHGLKYVRPSTSPLLKPPKGKSFSEYLGDWGSQELFTFLDIHKCGQYLAIFQENDINGKILLDLDVTALKSMGIDKISERVRLIGGIKDLRKRIADETIRAPFIQRCYPPERTLLPSLPSHSNVFLDKWDYSSSASRLGKGQIAFRPPPLDLQGHMPRKLLPHASQGIATIDTHDIRTTKPKIEAYIQQNPLGQPQSVPTKRSDSLTLCAPPSRNVRRRSPSSRHFEGRESQTDGFTILNMASDRQVPSSTMNSVTLGEDCHLQREEGLPLFLKVPQFRNTFASSHKTLIAGRGPLTRGDTISHQPSGPAIAGQDSPVNYRISKTVTTTKEASQGDLEHPFAVKSIGSQLGLLVGVSGMAHDPVTDGSKSKGKTSVPLTGTSSSDISAVNANSAALSLADLRRQLVKFINTEDDTIRTVNVMHVTSGEEILERALKKFGKWGTGMHSSPDVYGDEDGDETLEIDGWEVYTERTPDESSKPLSESSLLKTCTFHREGTAIQDKGLFLRKKQRLQKRKNIQHFFGETLPPPMSPTSPTLITGPHLGIVQGKSQLASEPAFSSSNRLSTLTNKGPNRASMISVMSGLGVPVINTLPSPQGNGLCPTGSVHSHKKKSMYNFFGHRPPSELISNHLADYFPSAKKSDVEKARHSLLRLSGDTVAYKKNGIDEGDNAPDHWSKPGNNQPPSLPPFEPSQDTLSDSLQAYASSTPVYLSRPKHNVALRRRRDSDSSSRSHTSVLMQTRRNRDRSDTASLLTVDEITAEVENRRASTIPKGDYIEETEDSSFIEGDTLPEYEESKGLLRTVCSDSNSIVDSGKSFQRDSDVDQQQELEDEEEDELDDEEEEEEEEKEDEDEQGKAFTSTGSKRIIKWIKGALIGAGSFGSVYLGMDAQSGLLMAVKQVELSAGSVKSEDRKKSMLSALEHEIELLKELQHENIVQYLDSSVDTNHLNIFLEYVPGGSVAALLNNYGAFEEGLVRNFVRQILTGLNYLHMRGIVHRDIKGANILVDNKGGIKISDFGISKKVENSLISGLRTNRPSLQGSVFWMAPEVVKQTSYSPKADIWSVGCLVVEMLTGTHPWADLTQMQAIFRIGSLARPAPPSDISVQADEFLRKTFEIEHAKRPTAAQLLKDPFIDSPRVRTTASNFISEAIVSEKMEVQVVEEM

SEQ ID NO: 12291 - protein, 404 aa, Escherichia coli
GKKITLQNGKLNVPENPIIPYIEGDGIGVDVTPAMLKVVDAAVEKAYKGERKISWMEIYTGEKSTQVYGQDVWLPAETLDLIREYRVAIKGPLTTPVGGGIRSLNVALRQELDLYICLRPVRYYQGTPSPVKHPELTDMVIFRENSEDIYAGIEWKADSADAEKVIKFLREEMGVKKIRFPEHCGIGIKPCSEEGTKRLVRAAIEYAIANDRDSVTLVHKGNIMKFTEGAFKDWGYQLAREEFGGELIDGGPWLKVKNPNTGKEIVIKDVIADAFLQQILLRPAEYDVIACMNLNGDYISDALAAQVGGIGIAPGANIGDECALFEATHGTAPKYAGQDKVNPGSIILSAEMMLRHMGWTEAADLIVKGMEGAINAKTVTYDFERLMEGAKLLKCSEFGDAIIK

SEQ ID NO: 12292 - protein, 327 aa, Triticum aestivum
MKTLLILTILAMAITIGTANIQVDPSGQVQWLQQQLVPQLQQPLSQQPQQTFPQPQQTFPHQPQQQVPQPQQPQQPFLQPQQPFPQQPQQPFPQTQQPQQPFPQQPQQPFPQTQQPQQPFPQQPQQPFPQTQQPQQPFPQLQQPQQPFPQPQQQLPQPQQPQQSFPQQQRPFIQPSLQQQLNPCKNILLQQSKPASLVSSLWSIIWPQSDCQVMRQQCCQQLAQIPQQLQCAAIHSVVHSIIMQQQQQQQQQQGIDIFLPLSQHEQVGQGSLVQGQGIIQPQQPAQLEAIRSLVLQTLPSMCNVYVPPECSIMRAPFASIVAGIGGQ

SEQ ID NO: 12293 - protein, 486 aa, Cycloclasticus oligotrophus
MQHINHFINGEFVSAVDGKSFEKRSPVDRRLIAQVSEGGKVDVDRAVHAARAALNGEWGAFTMEQRVEILYGVADEITRRFDDFVEAEMADTGQPKSIMTHAFIPRGAANFKIFADVIKNVPNESFQTTTPDGLGALNYAIRVPKGVVGVVSPWNAPFLLMTWKVGPALACGNTVVVKPSEETPLTTTLLGEVMNKVGVPKGVFNVVHGFGPDSAGEYLTHHPKVDAITFTGETTTGAAIMKAASEGMRDVSFELGGKNAGIVFADSDFDKAVDGIYKSSFLNSGQVCLGTERVYVERPIFDKFVEALKKKVEKVRHGRPDDENCNFGPMISHEHQAKVLSYYAKAVEEGATVVTGGGVPSIPEELKEGAWVEPTIWTGLAEDATVMKEEIFGPCCHIAPFDDEQQVINWANDTEYGLSTTVWTRDLSRAHRVAAKINVGITWINSWFLRDLRTAFGGSKQSGIGREGGVHSLEFYTETRNVCVKL

SEQ ID NO: 12294 - protein, 190 aa, Arabidopsis thaliana
MAFAGTTQKCMACDKTVYLVDKLTADNRVYHKACFRCHHCKGTLKLSNYNSFEGVLYCRPHFDQNFKRTGSLEKSFEGTPKIGKPDRPLEGERPAGTKVSNMFGGTREKCVGCDKTVYPIEKVSVNGTLYHKSCFKCTHGGCTISPSNYIAHEGKLYCKHHHIQLIKEKGNLSQLEGGGENAAKDKVVAA

SEQ ID NO: 12295 - protein, 446 aa, Mycobacterium tuberculosis H37Rv
MRALPAGRHFFRGSDGYEAARRGTVWHRRVPDRYPEVIVQAVSADDIVSAIRYATVNGHKVSVVSGGHSFAASHLRDGAVLLDVSRIDHASIDADKGRAVVGPGKGGSVLMAELEAQGLFFPGGHCRGVCLGGYLLQGGYGWNSRIYGPACESVIGLDVITADGAQIHCDADNHADLYWAARGAGPGFFGVVTSFYLKLYPRPATCGTSVYVYPFDLADEVFTWARAVSAEVDPRVELQALASRGEPSMGIDVPVISLASPAFADSPEEAEQALALFGTCPVVEQALVKVPYMPTDLPAWYDVAMTHYLSDHHYAVDNMWTSASAEDLLPGIRSILDTLPPHPAHFLWLNWGPCPPRQDMAYSIEADIYLALYGSWKDPADEAKYADWARSHMAAMSHLAVGIQLADENLGARPARFASDAAMAKLDRVRAEYDPDGLFNSWMGRI

SEQ ID NO: 12296 - protein, 496 aa, Burkholderia cepacia R18194
MTPFDTSLVPDGNILIGGEWRRGRGTPFASIYPADQSVNMEVSTANAEDAAEAVVAADAAWRRADWAGLKPHQRAQVLYRIADLIMQRHEALANLQRRDNGKPIGETRVLVASAANTFRYFAACLETLDEELTPSRGDYLTMSVYEPIGVIAAITPWNSPIASDAQKLAPALAGGNAVVLKPAEVTPLVSLALARICEEAGVPKGVLSVLPGKGSVIGDVLVRHPLVKKVSFTGGTEVGRGIARIAAEKLMPVSLELGGKSPTIVCDDADLDHAVNGVLYGIFSSSGEACIAGSRLFVQRAVYDEFMTRLVAGARKLRVGDPTRPDTQMGPLITAKHRESVERYVALGLEEGGRLLCGGERPSGDGRENGFFYQPTILEGLPNSARICQEEIFGPVLVAMPFDDEASLIAQANDSVFGLAAGIWTRDYKRAWRIARALETGTVWINTYKLFSISTPFSGWKESGMGREKGRLGIREYMQQKSLYWGLNDAPLPWAN

SEQ ID NO: 12297 - protein, 395 aa, Campylobacter jejuni
MKMDYKEQSHIVPAYKRFDIVLEKGQGVYLFDDKAKKYLDFSSGIGVCALGYNHAKFNAKIKAQVDKLLHTSNLYYNENIAAAAKNLAKASALERVFFTNSGTESIEGAMKTARKYAFNKGIKGGQFIAFKHSFHGRTLGALSLTANEKYQKPFKPLISGVKFAKYNDISSVEKLVNEKTCAIILESVQGEGGINPANKDFYKALRKLCDEKDILLIADEIQCGMGRSGKFFAYEHAQILPDIMTSAKALGCGLSVGAFVINQKVASNSLEAGDHGSTYGGNPLVCAGVNAVFEIFKEEKILENVNKLTPYLEQSLDELINEFDFCKKRKGLGFMQGLSLDKNVKVAKVIQKCQENALLLISCGENDLRFLPPLILQKEHIDEMSEKLRKALKSF

SEQ ID NO: 12298 - protein, 375 aa, Zea mays
MAAASWSAPTTSFAPAPAPPWGPWRTKAAPLPIRTLPRRVLLNAVGESAMVAAGDTLLGLYEKERLGLLQYADDESKEERYWETLDADLRYWTRSLRPVQWYPGHIAKTEKELKEQLRLMDVVIEIRDARIPLSTSHPKMDSWLGNRKRIIVLNRKDMISTEDMNAWATYFGNQGIKVVFSNGQLGMGTMKLGRMAKSVASVANTKRKEKGLLPRPVRAGIVGYPNVGKSSLINRLLKRRMCPAAPRPGVTRELKWVRFGTDLELLDSPGILPMRISDQTSAIKLAICDDIGERSYDFADVAAILVQMLIRHPAVGSEAFRRRYKIDVDSECGKTFVTKLSVHLFNGDTSQAAFRILSDYRKGKFGWVALERPPT

SEQ ID NO: 12299 - protein, 449 aa, Arabidopsis thaliana
MDKISGFSDDELLVKILSFLPFKFAITTSVLSKQWKFLWMRVPKLEYDEDSMYSFEYSFRYFLPKAKEVDSETYSIVSESGHRMRSFIEKNLPLHSSPVIESLRLKFFTEVFQPEDIKLWVEIAVSRCAQELSVDFFPKEKHNALLPRNLYTCKSLVTLKLRNNILVDVPHVFSLPSLKILHLERVTYGDGESLQRLLSNCSVLEDLVVELDTGDNVRKLDVIIPSLLSLSFGMSRYCAYEGYRIDTPSLKYFKLTDLSKTFSGLIENMPKLEEANITARHNFKKLLELVTSVKRLSLNIENNDAEALTAIYGDDIVFNELEHLNFHIHNAYWSELLYWLLKASPKLQNLEFDEQCSRDGTMGTLAVFWNQPNSVPQCLLSTLQTFEWSGYPGSVQGKDLATYILRKSRQLKIATISIGYGLDPQQKLKMEMDVKFSFRASPTCKRVFY

SEQ ID NO: 12300 - protein, 274 aa, Brassica napus
  unsure (1)..(274): unsure at all Xaa locations
MDIFDNSDLEYLVDDFHGFSDSEDDEPFGEFDHKSEADSDFEDDLDPTQESDTSALEARNGKDIQGIPWERLNYSRDQYRYKRLQQYKNFEILFRSRQDLDKECLQVEKGKHFYDFQFNTRLVKSTIAHFQLRNLLWATTKHDVYFMKNYSLMHWSSLLQRSKEVLNVAKPIVPTMKQPGLLSQSISRVQISTMAVKDDLIVAGGFQGELICKRINEPGVAFCTVLHRFXNDITNSVDIYNAPSGSLRVITANNDCTVRVLDAXNFAFLNSFTL

SEQ ID NO: 12301 - protein, 403 aa, Sisymbrium altissimum
YQGVYPVKCNQDRFIIEDIVRFGSSFGFGLEAGSKPEILLAMSCFCKGNPEAFLVCNGFKDSEYVSFALLGRKLELNTVIVLEQEEELDLVIDLSQKMNVRPVIGLRAKLRTKHSGHFGSTSGEKGKFGLTTIQILRVVRNLRQLGMLDCLQLLHFHIGSQIPSTALLSDGVAEAAQLYCELVRLGAHMKVIDIGGGLGIDYDGSKSGESDLSVAYTLEEYAEAVVASVRFVCDQKSVKHPVICSESGRAIVSHHSVLIFEAVSAVKQHANPDDIQFLLEGEEVRAEYEDLYAAVMRGDRESCFLYVDQLKQRCVEGFKDGSLSIEQLVSVDGLCESVLKAIGASDPVQTYNINLSVFTSIPDFWGIDQLFPIVPIHKHDQRPGARGILSDFTCDSDGKIDKF

SEQ ID NO: 12302 - protein, 294 aa, Staphylococcus aureus subsp. aureus COL
MVIQWYPGHMAKAKREVSEQLKKVDVVFELVDARIPYSSRNPMIDEVINQKPRVVILNKKDMSNLNEMSKWEQFFIDKGYYPVSVDAKHGKNLKKVEAAAIKATAEKFEREKAKGLKPRAIRAMIVGIPNVGKSTLINKLAKRSIAQTGNKPGVTKQQQWIKVGNALQLLDTPGILWPKFEDEEVGKKLSLTGAIKDSIVHLDEVAIYGLNFLIQNDLARLKSHYNIEVPEDAEIIAWFDAIGKKRGLIRRGNEIDYEAVIELIIYDIRNAKIGNYCFDIFKDMTEELANDANN

SEQ ID NO: 12303 - protein, 258 aa, Arabidopsis thaliana
MFLQVHEIAFLFGLLGNIVSFGVFLSPVPTFYGIYKKKSSKGFQSIPYICALASATLLLYYGIMKTHAYLIISINTFGCFIEISYLFLYILYAPREAKISTLKLIVICNIGGLGLLILLVNLLVPKQHRVSTVGWVCAAYSLAVFASPLSVMRKVIKTKSVEYMPFLLSLSLTLNAVMWFFYGLLIKDKFIAMPNILGFLFGVAQMILYMMYQGSTKTDLPTENQLANKTDVNEVPIVAVELPDVGSDNVEGSVRPMK

SEQ ID NO: 12304 - protein, 205 aa, Sulfolobus islandicus
YSIAKLASHKLWNLLNTEPYIATFGALTGSQAVEMAKAGLKAIYVSGWQVAADNNLSNQTYPDLSLYPSNSVPNLVKRLNNALLRADQISWSEGKHDIDYLLPIVADAEAGFGGPIHAFELTKALIEAGAAGVHFEDQLAAEKKCGHLGGKVLIPISAFIRVLNAARLASDVLGVPIILIARTDALNAKYLSNDVDETDNQFLTG

SEQ ID NO: 12305 - protein, 297 aa, Zea mays
  unsure (1)..(297): unsure at all Xaa locations
MAIATESRGSEDRASAHANEEKRWVLSDFEVGKPLGRGKFGHVYLAREKRSNQIVALKVLFKSQLKQSQVEHQLRREXVEIQSHLRHPNILRLYGYFYDQTRVYLILEYAAKGELYKELTRCKXXXERRTATYVASLARALIYLHGKHVIHRDIKPENLLVGVQGEIKIADFGWSVHTFNRRRTMCGTLDYLPPEMVEKAEHDYHVDIWSLGVLCYEFLYGVPPFEAKEHSETYRRIVKVDLKFPLKPFVSPAAKDLISQMLVKSSAQRLPLHKVLEHPWIVQNADPSGVYREGRSI

SEQ ID NO: 12306 - protein, 72 aa, Glycine max
MPLVLAKSDSIQIREVWNDNLEEEFALIREIVDDYPYIAMDTEFPGIVLRPVGNFKNSYDYHYQTPKDNVDM

SEQ ID NO: 12307 - protein, 403 aa, Stanleya pinnata
YQGVYPVKCNQDRFIIEDIVRFGSSFGFGLEAGSKPEILLAMSCFCKGNPEAFLVCNGFKDSEYVSFALLGRKLELNTVIVLEQEEELDLVIDLSQKMNVRPVIGLRAKLRTKHSGHFGSTSGEKGKFGLTTIQILRVVRNLRQLGMLDCLQLLHFHIGSQIPSTALLSDGVAEAAQLYCELVRLGAHMKVIDIGGGLGIDYDGSKSGESDLSVAYTLEEYAEAVVASVRFVCDQKSVKHPVICSESGRAIVSHHSVLIFEAVSAVKQHANPDDIQFLLEGEEVRAEYEDLYAAVMRGDRESCFLYVDQLKQRCVEGFKDGSLSIEQLVSVDGLCESVLKAIGASDPVQTYNINLSVFTSIPDFWGIDQLFPIVPIHKQDQRPGARGILSDFTCDSDGKIDKF

SEQ ID NO: 12308 - protein, 139 aa, Triticum aestivum
  unsure (1)..(139): unsure at all Xaa locations
MSDSEEHHFESKADAGASKTYPQQAGTVRXKNGFHPSIKEPPCKFVEVLPPKTGXKHGPCQIHFXFXINIFQTGKXPEICPFVTQLXIFPHVNXTXYQLDLIYPKDGFVPSLLQNGNTXIFLTPNWSLWPLRRFLNCLL

SEQ ID NO: 12309 - protein, 118 aa, Oryza sativa (japonica cultivar-group)
MARAQLVLVALVAAALLLAGPHTTMAAISCGQVNSAVSPCLSYARGLRPSAACCSGVRSLNSAASTTADRRTACNCLKNVAGSISGLNAGNAASIPSKCGVSIPYTISPSIDCSRELI

SEQ ID NO: 12310 - protein, 173 aa, Prunus armeniaca
MEHEETGCQPHPEGPILCVNNCGFFGSVATRNMCSKCHKDMMLKEEQAKLAASSFGNIVNGTSNSNGNEPVVAAGVDVQAHLVEPKTISLQPSFSFGSGSGGSGEAKPEGPKRCGTCNKRVGLTGFNCRCGHLFCAVHRYSDKHDCPYDYHTAARDVIAKANPVVKADKLEKI

SEQ ID NO: 12311 - protein, 367 aa, Prunus persica
MGKGGMSSQGGALEAHVEQENMAAWLVGVNTLRIQPFKLPTVGPNDVRVKIKAVGICGSDVHYLKTMKCADFVVQEPMVIGHECAGIVDEVGSLVKNLVPGDRVALEPGISCWRCEQCKGGRYNLCPDMKFFATPPVHGSLANQIVHPADLCFKLPENVSLEEGAMCEPLSVGVHACRRANIGPETNVLVIGAGPIGLVSVLSARAFGAARIVIVDVDDERLSIAKSLGADDAVKVSTNPQDLEDEVSKISKAMKGGVDVSFDCVGFNKTMSTALSATRPGGKVCLVGMGHGVMTVPLTPAAAREVDVVGIFRYKNTWPLCLEFLRTGKIDVKPLITHRFGFSQKEIEEAFETSARGGNAIKVMFNL

SEQ ID NO: 12312 - protein, 206 aa, Schizophyllum commune
MALCGSSKGRGRGRPIQRKVVVCGDGACGKTSLLNVFTRGFFTQVYEPTVFENYVHDLYIDDQLVELSLWDTAGQEEFDRLRSLSYAETHVIMICFSVDNPTSLENVESKWLDEILEYCPGVKLVLVDSKCDLRDDPAVLDRLQRYGTHTDQYEEGLGVARRIRASRYLECSSKHNRGVNEVFLRGRARVTVHSIRQGSAGSCCVM

SEQ ID NO: 12313 - protein, 342 aa, Methanosarcina acetivorans C2A
MTKTAAVIKGDGVGPELVEAMLKVANAAGTDVEFVMCEAGAGWWEEHGGNSLVPDETWQILDSSDACFKGPTTTPGGIGSPRSVAVSIRRKYDLYANVRPIKTFPNSNAPLGDVEMVCVREGTEGLYIGEEIQLTDDVSIAIRKITRTASGKIARYAFEEAKRRGYDTVVPIHKSNILKLTCGSFLEEVEKVAQDYPNIEVWPYHIDNIAQQLIKNPQIFNKKVLLSTNLFMDVISEECSALVGSIGLIYSANLGDNFAMFEPAHGSAPKYAGLDKVNPVATVLAGAWMLDYLGEKEKSEAIFKATERVISEGKYVTYDVGGNAKLSQMADEIAKYTAEILK

SEQ ID NO: 12314 - protein, 367 aa, Glycyrrhiza echinata
MSDSYSTKDNNLFSTSSEQTEDGACLSAMRLVTNLVYPAVLNAAIDLNLFEIIAKATPPGAFMSASEIASKLPLPTQHSDLPNRLDRMLRLLASYSVLTCATRSTERVYGLSQVGKYLVPDGSRGYLASFTTFLCYPALMNVWLNFKEAVVDEDIDLFKKLHGVSKYEYMETDPKMNHIFNKSMADVCATEMKRILQIYKGFEGISTLVDVGGGNGQNLKMIISKYPLIKGINFDLPQVIENAPPIPGIELVGGDMFASVPQGDAMILKAVCHNWSDEKCLEFLSNCHKALSPNGKVIVVEFILPEEPEPTEESQLASTLDNIMFITVGGRERTQKQYENMCKLAGFSKFQVACRAFSSLGVMEFYK

SEQ ID NO: 12315 - protein, 290 aa, Glycine max
SWSISVFEQVKWIRVLYADFTAFIRDQEKLIFAEKAFDYVEGFVIINRTGLLNNWSSSFNPQDPVQASEFKSDGRTLFCLELAKYYNLEETLLVNQEVEKHLSRLNYIPSTLFLTEVTYVDFLDRVHTSEVKLRSKGLWDVPHPWLNLFIPKTKIHHFAEVVFGNIVTETSNGPVLIYPVNKSKWDNRTSVVIPEEDIFYLVAFLTSAVPSSNGTDGLEHILSQNKRILEFCERAQLGVKQYLPHYNTQQEWRAHFGPQWETFLLRKSVYDPLAILAPGQRIFQKAITFS

SEQ ID NO: 12316 - protein, 497 aa, Pseudomonas syringae pv. tomato str. DC3000
MTTLTRADWEQRAQNLKIEGRAFIQGEYTAAASGETFDCISPVDGRLLAKVASCDAADAQRAVESARSAFDSGAWSRLAPAKRKATMIRFAGLLEQNAEELALLETLDMGKPISDSLGVDIPGGARALSWSGEAIDKLYDEVAATPHDQLGLVTREPVGVVAAIVPWNFPLMMACWKLGPALSTGNSVVLKPSEKSPLTAIRIAQLAIEAGIPAGVLNVLPGYGHTVGKALALHMDVDTVVFTGSTKIAKQLMIYAGESNMKRVWLEAGGKSPNIVFADAPDLQAAADSAASAIAFNQGEVCTAGSRLLVERSIKDRFLPMVIEALGTWKPGNPLDPATNVGALVDTQQMNTVLSYIAAGHTDGARLVAGGKQILQETGGTYVEPTIFDGVNNAMRIAQEEIFGPVLSVLTFDTAEEAIQIANDTPYGLAAAVWTANLSKAHLTARALRAGSVWVNQYDGGDMTAPFGGFKQSGNGRDKSLHAFDKYTELKSTWIKL

SEQ ID NO: 12317 - protein, 205 aa, Triticum aestivum
  unsure (1)..(205): unsure at all Xaa locations
PGIYLHSTPLAPPVMACSATSVGPFQGXLKSTAGLPVTRRSNGASLASVSHGGRIRCMQVWPIEGIKKFETLSYLPPLSTEALLKQIDYLIRSKCVPCLXEFSKVGFIFREHNASPGYYDGRYWTMWKLPMFGCTDATQVINEVEEVKKEYPDAYVRIIGFDNMRQVQCTSFIAFKPPPPEEKAPPSPAHSRQAIYKVPLQFCQL

SEQ ID NO: 12318 - protein, 180 aa, Glycine max
  unsure (1)..(180): unsure at all Xaa locations
MSGRVSGKVKWFNDQKGFGFITPDDGSEELFVHQSQIKSDGFRSLAEGESVEFAIESESDGRAKAVDVTGPDGASVQGTRRGGDGGRSYGGGRGGGYGGGGRGGGGGACYNCGESGHLARDCSQGGGGDRYGGGTEXNGRFGGDGKKRYGGGGGGGGGGGSCYSCGESGHFARDCPSSAR

SEQ ID NO: 12319 - protein, 208 aa, Glycine max
SGRDVACPQLGTRLEIISEHTLLLIFIILPLSIPNSLSEIRMASQSNTKSVHDFTVKDARGNDVNLADYKGKVLLLVNVASQCGLTNSNYTELNQLYEKYKGKGLEILAFPCNQFGAQEPGTNEEIVEFACTRFKAEFPIFDKVDVNGDNAAPLYKFLKSSKGGLFGDSIKWNFSKFLVDKDGNVVDRYAPTTSPLSIEKDIKKLLDA

SEQ ID NO: 12320 - protein, 243 aa, Zea mays
MFGYRKADPDLEAGGSSLLYPGMTESPELRWAFVRKIYVILTVQLAMTAAVSAFVVKVPAVSNFFVSSNAGIALYIFLIVLPFIVLCPLHYYHQKHPINLLLLGLFTVAISFAVGMTCAFTSGKIILEAAILTAVVVNSLTAYTFWAAKRGHDFNFLGPFLIAAIMVLMVFSLIQIFFPLGKISVMIYGGLASLIFCGYIIYDTDNIIKRHTYDQYIWAAVSLYLDVINLFLSLLQLLRAADS

SEQ ID NO: 12321 - protein, 277 aa, Glycine max
MPLVLAKSDSIQIREVWNDNLEEEFALIREIVDDYPYIAMDTEFPGIVLRPVGNFKNSYDYHYQTLKDNVDMLKLIQLGLTFSDEHGNLPTCGDESGTCCIWQFNFREFNVNEDVFANDSIELLRQSGIDFKRNNENGIDAHRFGELLMSSGIVLNDNVHWVTFHSGYDFGYLLKLLTCQDLPDTQVGFFNLINMYFPTVYDIKHLMKFCNSLHGGLNKLAELLEVERVGICHQAGSDSLLTSCTFRKLKDNFFSGSLEKYAGVLYGLGVENGQGSH

SEQ ID NO: 12322 - protein, 230 aa, Mycobacterium avium subsp. paratuberculosis str. k10
MSNNITWHEHKISRGEREQLNGHKGCVIWFTGLSGSGKSTVANVVEQKLYERGIRSYLLDGDNVRYGLNAGPDLLEERHGPEFAQRFGLGFSAQDREENIRRIGAVAKLFCEAGIIALTAFISPYVRDRDAIRATLDDGDFQEIFIDTPIEICEKRDPKGLYKKARAGEIKGFTGIDDPYEAPPRPELRLDGAAKDAETLAEEVIAHLERVGVIATDGLAHTRGRDEVTA

SEQ ID NO: 12323 - protein, 475 aa, Bordetella parapertussis 12822
MYEQLALYIDGEFLTGDGRRTQDVVNPATLEVLGQLPHASEADLDRALAAAQRAFETWKRTSPMERAAILRKVGQLSRDRAQEIGRNMTLDQGKPLAEAVGEVASCSEHADWHAEECRRIYGRVIPPRNPDVRQFVVREPIGVCAAFTPWNFPYNQAIRKIAAALGAGCTVVLKGPEDSPSAVMAIARMFHEAGLPKGCLNIVWGEPAKISDYLIRSPIVRKVSFTGSVPVGKQLAALAGAHMKRVTMELGGHSPVLVFDDADVDRAAEMLERFKVRNAGQVCVSPTRFYVQNGAYEQFLARFTEVLKNIKVGDGLEKGTDMGPLAHERRVPAMSTFVDDALKHGGKVVLGGDAPDRKGYFFSPTVVTELPDNAMLMTEEPFGPLAPVVRFTDTDEVLRRANSLPFGLSSYVFTNSLKTATKVSNALEAGMVNINHFGSALAETPFGGIKDSGIGSEGGLETFDGYLVTKYITHI

SEQ ID NO: 12324 - protein, 250 aa, Capsicum annuum
MGKCYPTVSEEYLKAVDKCKRKLRGLIAEKNCAPLMLRLAWHSAGTYDVCSKTGGPFGTMRFKTEQSHGANNGIDIALRLLEPIREQFPILSYADFYQLAGVVAVEVTGGPDVPFHPGREDKPEPPVEGRLPDATKGSDHLRDVFVKQMGLSDQDIVALSGGHTLGRCHKERSGFEGPWTANPLIFDNSYFKELLGGEKEGLLQLPSDKALLSDPAFRPLVEKYAADEDAFFADYAEAHLKLSELGFAEA

SEQ ID NO: 12325 - protein, 407 aa, Sporothrix schenckii
MSFSSMLSRLHGQPDSYDKKSKYHFGRMLGAGTYGIVREADGPTGKVAIKVILKKNVKGNEQMVYDELNLLQNLKHSHIVRFVDWFESRDKYYIVTELATGGELFDRICEQGKFTEKDASQTIKQVLSAVDYLHKNNVVHRDLKPENLLYLTKQSDSDLVLADFGIAKMLDSKDEVLTTMAGSFGYAAPEVMLKKGHGKPVDMWSMGVITYTLLCGYSPFRSENLPDLIEECTSARVIFHERYWKDVSEDAKDFIIGLLQPNPDDRWSSGDALKHKWLSGESATEHNLLPEIKAYMAKARLRRGIELVKLTNRIEALKMQEDDPENSDMQTDTAAPLQKAAAAAAAQDDGASGSVGAESGPTDKTKQTIQKVKGAIFREVVMAKVREMRQQEEVRKEVEEASKQGSP

SEQ ID NO: 12326 - protein, 127 aa, uncultured marine gamma proteobacterium EBAC20E09
MATSKDDILKAIEEMSVMDLVDLISAIEEKFGVTAAAAVAAAPAAAGGDGDAPAAEEKDEFDVVLSAAGDQKVQVIKAVRAITGLGLKEAKDMVDGAPSTLKEGVKKEEAEGMLAQLTEAGATGELK

SEQ ID NO: 12327 - protein, 388 aa, Salmonella enterica subsp. salamae
QNGKLNVPENPIIPFIEGDGIGVDVTPAMLKVVDAAVEKAYKGERKISWMEIYTGEKSTQVYGQDVWLPAETLDLIRDYRVAIKGPLTTPVGGGIRSLNVALRQELDLYVCLRPVRYYQGTPSPVKHPELTDMVIFRENSEDIYAGIEWKADSADAEKVIKFLREEMGVKKIRFPEHCGIGIKPCSEEGTKRLVRAAIEYAITNARDSVTLVHKGNIMKFTEGAFKDWGYQLARDEFGGELIDGGPWLKIKNPNTGKEIVVKDVIADAFLQQILLRPAEYDVIACMNLNGDYISDALAAQVGGIGIAPGANIGDECALFEATHGTAPKYAGQDKVNPGSIILSAEMMLRHMQWFEAADLIVKGMEGAIAAKTVTYDFERLMEGAKLLK

SEQ ID NO: 12328 - protein, 127 aa, Brassica napus
MAGMVFGLEAPMMTALQHLLDIPDGEAGAPAGEKQGPTRAYVRDARAMAATPADVKELPGAYAFVVDMPGLGSGDIQVQVEDERVLVISGERRREEKEDAKYLPMERRMGKLMRKFVLPGNADMEKI

SEQ ID NO: 12329 - protein, 292 aa, Zea mays
  unsure (1)..(292): unsure at all Xaa locations
EDYYNPNFAVEDARGPREPWDDLHSKIDGPEAYDVLKNFEERWLKASKRSAAKKLSKLSRSHNDSLLWINKIPDIIAIDDEIYSNDDDPERWDVQIFRSIDSNSVKGFPKDPREATSKNLVCGXNVLIDMSVHTTYVNAIRGAQHFIYIENQYFLGSSFNWDSHRDVXKMTMQIMYEIIYKAMKEVGLDGTYEPQDYLNFFCLGNREAEDTTCTSSGPFSTTWISNQDQARNNRRFMVYVHSKGMIVDDEYVIIGSANINQRSMEGTRDTEIAMAAYQPQHTLANMLSAPRG

SEQ ID NO: 12330 - protein, 104 aa, Triticum aestivum
  unsure (1)..(104): unsure at all Xaa locations
NTPTTKEAYYYRPVAEKFXFPRNAVRLTVPGXGPSVACSTAKAVEWDTAWSKLLDPSGRAGLGVHHSAYKQKAPGSVDPAVDDVSCSPAHDVKRLKTAVSAAAV

SEQ ID NO: 12331 - protein, 450 aa, Desulfovibrio desulfuricans G20
MTATRFESGSIVLDTTIPNLGPAKIPSPLSYCRFANEEQGLSLFLDHDQVEELGDEVVPLTFEPAGPRRHVYFDTSKTKCAIVTCGGLCPGINDVIRAIVMEAYHNYRVPAVLGIKYGLEGFIPRYGHDVVELTPALVGDIHQFGGTILGSSRGPQSPEEIVDALERMNVNILFMIGGDGTMKAVRSITGEINQRRLKISVIGIPKTIDNDINFISQSFGFETAVDKATEAIQCAHTEAVGAMNGIGLVKLMGRESGFIAAQATLSLKEVNFVLVPETPFTLHGEDGLLNALAQRLRERSHAVIVVAEGAGQHLLSGSHDTDASGNPILGDIATLLRTEIKSHFDKLGIPHTLKYIDPSYIIRSVPANANDRVYCGFLGQNAVHAGMAGKTGMVVAKLMDRYIHLPLDLVTSKRRKLNIISDFWRAVLESTGQSHLAGMVPPEARSCPRA

SEQ ID NO: 12332 - protein, 437 aa, Neurospora crassa
MAPSAGCEHTPMHLPALSTASSINASVLHGPRDLRLERRTIEEPELGELQVAVKTTGICGSDVSYYKKFANGDLCACMPLSLGHESSGVVVAIGPQVSGFSLGDRVALEVGVACGQCTICRKGRYNLCKKMRFRSSAKSVPHYQGTLQERINHPAIWCHILPDHISFDAAALLEPLSVGIHAVNRASPAPGSTALVLGAGTVGLLTAAMARQAGCTQVTITDVDQGRVDHAIFKGFATHGYLVPRSHHISSSSSSMFPNSNSNSSSGSSTPSDGIATPPSTLSFRSSLDSAKALAADVLTQTQNPVLDRDDEDIGVDVTFECTGKEVCMHTALYATRPGGKVIMVGMGTPIQTLPLSVAHLREIDILGVFRYANTYATGIRMLCNQKGSGAGFTLPSLDDMVTHRFKGLENAKGAFELASRTMDNEGNLVLKVVIEA

SEQ ID NO: 12333 - protein, 216 aa, Halobacterium sp. NRC-1
MRGQPVHRRSVLALVGGGAVSALAGCTDTTDGDATTTTPEPTPRSETQPTPTATDDIPIAGPSPDFGGLGLASNAFADGAAIPDRYTRSGADVNPPLSIAGVPEDAATLVLVVDDPDAVDPAGEVWLHWLVWNIPASRTRIPAAWTPTEPTVGTNDFGERDYGGPAPPDDTHLYRFKLYALDTTLILPQDATERTVGNAVRGHVLASTQLVGSHAP

SEQ ID NO: 12334 - protein, 507 aa, Caulobacter crescentus CB15
MTQVFPTPAAHAREILAKLGAPPLPADAGEPVRGPIDGAILGHVVYDDARQIEAKVAAACRAFADWRVVPAPRRGELVRLFGEELRAAKADLAALVTLEAGKIASEAAGEVQEMIDICDFAVGLSRQLHGLTIASERPGHAMRETWHPLGPVAVISAFNFPVAVWAWNACLALVCGDPVIWKPSEKTPLTALATQAILERALARFRDAPQGLSSVVLGARDAGERLARDPRIPLVSATGSTRMGRAVAPMVAERFGRSILELGGNNAMIVTPSADLSLALRAIVFSAAGTAGQRCTSLRRLIVHESLVDKVSDAVEAAFQRLSVGDPRDPKTLLGPLIDKAAYDAFIAAMNQVRAEGGSVAGGERVLIDEHPDAYYVRPALARLPAPAPCMQRETFAPLLHVVPYNSFDMAIAIQNDVPQGLSSCVMTNDVREAERFLAAAGSDCGIANVNIGPSGAEIGGAFGGEKETGGGRESGSDSWKQYMRRQTATVNYSGALPLAQGVRFDL

SEQ ID NO: 12335 - protein, 194 aa, Glycine max
MGFRFKSNPQLRRGLCCANDDKQQERSPSVIVIGGGMAGIAAARALQDASFQVILLESRERLGGRIHTDYSFGFPVDLGASWLHGVCKENPLAPLIGKLGLPLYRTSEDNSVLYDHDLESYALFDMDGNQVPQELVTKIGKIFGVILEETNNVREEFSEDMSILRALSIVFERKPELRLEGLSHQVLQWYYAEW

SEQ ID NO: 12336 - protein, 131 aa, Oryza sativa (indica cultivar-group)
MDATTTDATTAKRKRPAASDIADDAPTTVDEVSDAEVEEFYAILRRMRDATRRLGARPPPPRAPAWRPSFSWEDFADAPPKQAPPPPQQPADHERVAENATPPRRPAPGLDLNVEPPSDAPATPRSARAPA

SEQ ID NO: 12337 - protein, 469 aa, Streptococcus pyogenes M1 GAS
MVSVMWFRRDLRIDDQKALAHAIASQSPTLCVFQFNKEQLNLLHSRNQSSFITSVLAFRKLLKCEGIDLYLMYGDLMTCFEQLLTQLKDWTDVYFNYDESGYGRLRDQKAAQFFKKNGIAVHTYQDHYLHGSQEIINQSGQPYKVFTPYYRIWQNYPKETPIKVELSQGRWLNLETPDDVLRTVESFKDEKYQDVATFDEASKQLNRFIQDQLAAYHANRDFPAQLGTSRLSPFLRIGAIGIRTVYHAVRQAPNSLGQATFLKELAWRDFYNMVYVAYPDQKTQPIQKAFSQIEWVNNPDWFQLWKEGKTGYPIVDAAMLQLQKTGWMHNRLRMIVASFLTKDLLCDWRLGEQYFQQQLIDYDAASNIGGWQWAASTGTDAVPYFRIFNPVTQGKRFDPKGEFIKAYLPQLEHVPEKYLHEPWKMPKNLQESVSCIIGTDYPQPIVDHAKQREQAIAKYEWAKEKAKIE

SEQ ID NO: 12338 - protein, 153 aa, Medicago sativa
TTRKITLKSSDGETFEVDEAVALESQTIKHMIEDDCADSGIPLPNVTSKILAKVIEYCKKHVDAAAAEDKPNEDELKSWDSEFVKVDQATLFDLILAANYLNIKSLLDLTCQTVADMIKGKTPEEIRKTFNIKNDFSPEEEEEVRRENQWAFE

SEQ ID NO: 12339 - protein, 205 aa, Sulfolobus islandicus
YSIAKLASHKLWNLLNTEPYIATFGALTGSQAVEMAKAGLKAIYVSGWQVAADNNLSNQTYPDLSLYPSNSVPNLVKRLNNALLRADQISWSEGKHDIDYLLPIVADAEAGFGGPIHAFELTKALIEAGAAGVHFEDQLAAEKKCGHLGGKVLIPISAFIRVLNAARLASDVLGVPTILIARTDALNAKYLSNDVDETDNQFLTG

SEQ ID NO: 12340 - protein, 403 aa, Thellungiella salsuginea
YQGVYPVKCNQDRFIIEDIVKFGSSFRFGLEAGSKPEILLAMSCLCKGNPEAFLVCNGFKDSEYISLALLGRKLELNTVIVLEQEEELDLVIDLSQKMNVRPVIGLRAKLRTKHSGHFGSTSGEKGKFGLTTIQILRVVRNLRQAGMLDCLQLLHFHIGSQIPSTALLSDGVAEAAQLYCELVRLGAHMKVIDIGGGLGIDYDGSKSGESDLSVAYTLEEYAEAVVASVRFVCDQKSVKHPVICSESGRAIVSHHSVLIFEAVSAVKQHANPDDIQFLLEGEEVRADYEDLYAAVMRGDRESCFLYVDQLKQRCVEGFKDGSLSIEQLASVDGLCESVLKAIGASDPVHTYNINLSVFTSIPDFWGIDQLFPIVPIHKLDQRPGARGILSDFTCDSDGKIDKF

SEQ ID NO: 12341 - protein, 329 aa, Pyrococcus furiosus DSM 3638
MLKKSEEIEGTKVEGPWLDDTKSLEEVVSLYTQIGFQATHLGKAIEIWRKIEEKREKGEEIRVFLGYTSNIVSSGLREIIAWLVKHRKVDVIVTTAGGVEEDFIKALKPFILGDWIVNDAELRKKGINRIGNIFVPNDRYIEFEKYMIPFFERILEIEREKGRPLTASEFIYELGRFMDEKLGKEKEKSIIYWAYRNEIPIFCPAITDGSIGDMLYFFKEERRDRELIIDIANDIVKLNNLAVTAKETASIILGGSLPKHAIINANLFRGGSDYAIYITTAVPWDGSLSGAPPSEGVSWGKIRAKADYVEIWADATLVFPILVWMVMKR

SEQ ID NO: 12342 - protein, 134 aa, Zea mays
FGSRLSQKPKPKGVTFIFIIQSFQRSSFFFFSSESRKHALAEVKLRFCPSSGGVGEEHVRRNNNIDIDMARCFGLGSVLVLAALAASMVVLPLMLPPLPPPPLVLLFFPVGIMAALMLLAFSPSDQNGVVYAST

SEQ ID NO: 12343 - protein, 570 aa, Glycine max
  unsure (1)..(570): unsure at all Xaa locations
MCGILAVLGCVDNSQTKRARIIELSRRLRHRGPDWSGIHCYEDCYLAHQRLAIVDPTSGDQPLYNEDKTVIVTVNGEIYNHKQLRQKLSSHQFRTGSDCEVIAHLYEEHGEEFVNMLDGMFAFILLDTRDKSFIAARDAIGITPLYLGWGHDGSTWFASEMKALSDDCERFISFPPGHIYSSKQGGLRRWYNPPWFSEDIPSTPYDPTLLRETFERAVVKRLMTDVXPFGVLLSGGLDSSLVAAVVNRYLAESESARQWGSQLHTFCIGLKGSPDLKAAKEVADYLGTRHHELYFTVQEGIDALEEVIYHIETYDVTTIRASTAMFLMSRKIKALGVKMVLSGEGSDEIFGGYLYFHKAPNKKEFHEETCRKIKALHLYDCLRANKSTAAWGVEARVPFLDKEFINVAMSIDPEWKMIRPDLGRIEKWVLRNAFDDDKNPYLPKHILYRQKEQFSDGVGYSWIDGLKDHANKQVTDATMMAANFIYPENTPTTKEGYLYRTIFEKFFPKNAAKATVPGGPSVACSTAKAVEWDAAWSKNLDPSGRAALGIHDAAYDAVDTKIDEPKNGTL

SEQ ID NO: 12344 - protein, 75 aa, Glycine max
MADSDLSSSQISTHSTDSGNRGSSKVEFSEDEETLIIRMYKLVGERWSIIAGRIPGRTAEEIEKYWTSRFSGSSE

SEQ ID NO: 12345 - protein, 405 aa, Nasturtium officinale
YQGVYPVKCNQDRFIIEDIVEFGSKFRFGLEAGSKPEILLAMSCLCKGNPEAFLVCNGFKDSEYISLALLGKKLELNTVIVLEQEEELDLVIDLSQKMNVRPVIGLRAKLRTKHSGHFGSTSGEKGKFGLTTIQILRVVRKLRQVGMLDCLQLLHFHIGSQIPSTALLSDGVAEAAQLYCELVRLGANMKVIEIGGGLGIDYDGSKSGESDLSVAYTLEEYAAAVVASVRFVCDQKSVKHPVICSESGRAIVSHHSVLIFEAVSAGQQHETPSDVQFMLEGYSEEVRADYENLYGAAMRGDRESCLLYVDQLKQRCVEGFKEGSLSIEQLAGVDGLCESVIKAIGASDPVLTYNINLSVFTSIPDFWGIDQLFPIVPIHKLDQRPVARGILSDLTCDSDGKMDKF

SEQ ID NO: 12346 - protein, 436 aa, Oryza sativa (japonica cultivar-group)
MGFVESIGRYRVGRTIGAGTFAKVRLAVDADTGATVAVKVIDKRMVIRNNLMYQVKREITAMKLLNHPNIVKIYEVIATKTKICLVMEYVSGGQLSDKLSYLKRLDEKEAKKYFYQLIDAVDYCHRRGVYHRDLKPENLLVDNQGNLKVSDFGLSVLKKPGQFLSTSCGSPCYVAPEVIQHKSYDGAAADVWSCGVILFELLAGYLPFQDCSLTNLYRRISRAQFVFPQWLSVPQKKIIIRILDPSPITRAKISDIFDDKWLQDHCNPSARIENDDDCDVIEEASTDSDSSHNTEVKETEEMTAETDRFINAFQLIARCSDLDLSGLFQEQKTKLASPHPVQETFDKIKVAAKDVSMAVKRMNSSLVEIQDSKLLPRSNLDLTLSAEVIKVTPAHCVVEVSKSTGDLRSYKEFCRSLSSLLNGGQLSASSSDMECD

SEQ ID NO: 12347 - protein, 170 aa, Campylobacter jejuni
MINSPYIIWLTGLAGSGKTTIGQALYEKLKLKYKNLIYLDGDELREILGHYAYDRQGRIDMALKRAKFAKFLNDQGMMVIVTTISMFNEIYDYNRKQLKNYYEIYIECDMHELMQRDQKGLYTKALNKEIDNVVGVDIEFDKPEADLVINNSCRNNLEEKVELIIKKLAL

SEQ ID NO: 12348 - protein, 455 aa, Arabidopsis thaliana
MNLIRFLLVFQGKIQMNESRKKLNCQSRQFNVDKISDLPEDLLVHILSLLPTTNDIVATSGVSKRWESLWTKVHKLRFNDRIYDGKRYDSFLHFVEKSLILHKAPTLVSLRLSVGPKCTADDIGLWIKLALDRNICELIIKHYPDHGHIRLSRRLCDSKTLVSLKLKNAILGAIWLPTCFISLKTLHLRYVKYSGDESVRTLISSCPSLRNLVVKRHNEDNVKRFAIIVRYLQSLTVYLSPLHGVADSDAYVINTPNLKYLNIKDHYTDLCSFEDMPYLDEANLDVAFTHTENFFESLTSVKKLSLCLKKSNAQYPEGIIFSQLDHLELCTCDDSKWLNILAMLLPDSPKLRVLKLNDKNHDFVDKYCSCTWNQQPSYVPECLTKSLEIFEWRNYKATFRERDVAVYILKNSTCLKKTVISPKLKISGEICDHHIIREDLASLFMGSSSCELKFD

SEQ ID NO: 12349 - protein, 494 aa, Triticum aestivum
MSATCAADLGPLLGAAAANATDYLCNRFADTTSAVDSTYLLFSAYLVFAMQLGFAMLCAGSVRAKNTMNIMLTNVLDAAAGALFYYLFGFAFAFGTPSNGFIGKHFFGLKDMPQTGFDYSFFLFQWAFAIAAAGITSGSIAERTQFVAYLIYSAFLTGFVYPVVSHWIWSVDGWASAARTSGPLLFKSGVIDFAGSGVVHMVGGIAGFWGALIEGPRIGRFDHAGRSVALKGHSASLVVLGTFLLWFGWYGFNPGSFVTILKSYGPPGSINGQWSGVGRTAVTTTLAGSVAALTTLFGKRLQTGHWNVVDVCNGLLGGFAAITAGCSVVDPWAAVICGFVSAWVLIGLNALAGRLKYDDPLEAAQLHGGCGAWGIIFTALFAKKQYVEEIYGAGRPYGLFLGGGGRLLAAHIVQILVIAGFVSCTMGPLFLALKKLGLLRISAEDEMAGMDLTRHGGFAYVYHDDDEHDKSVGGFMLRSAQTRVEPAAAANSQV

SEQ ID NO: 12350 - protein, 232 aa, Zea mays
QSSVQNPKFVTNTTVRPLCIITASDVSHVQTAVRCGRWNGVRLRVRSGGHDYEGLSYRSVQPEVFAVLDLARLRGVQVRPGDDSAWVDAGTTLGELYYAVGTTNPGFLFPGGACATVGVSGFISGGGIGLMMRKYGVGGDNVVDARIVNANGDVLDRFAMGDDLFWAIRGGGGETFGVVVAWRLKLSKVPPTVTVVNVLRTMEQGAADLVAKWETTILQPPVLPDLTIRVVL

SEQ ID NO: 12351 - protein, 273 aa, Lactobacillus johnsonii NCC 533
MKHLTLNNGVKIPIFGFGTYEISPDQTKEAVLSAFKDGYRLIDTAQYYQNEQQVGEAVRASNLNRDEVFITTKTMTDGYEATKQGLDESLNKSGLDYFDLVLIHWPMGHDLDTWRALEEAYKAGKTRAIGISNFNSRQTLELINHAEIRPMVDQIETHLLLQQWKMHEFLKKENIIHESYSPLGNGQQNLMTNPVLQKIGEKYGKSPIQVILRYLVQNDIVTIPRSTNPAHIKANIDIFDFELDKEDLKQLCALDERKPIDGWPAEMREDEDY

SEQ ID NO: 12352 - protein, 236 aa, Oryza sativa (indica cultivar-group)
MRSNGVIPLDYALFRPLPPNKEAVDANTLLHYTNVFDAVVDAAYFAMAYLNVTNVPVMVTETGWPHKGDPSNEPDATSDNADTYNSNLIRHVMNTTGTPKHPGVAVPTYIYELYDEDTRPGSTSEKYWGLFDMNGIPAYTLHLTGSGVLLANDTTNQTYCVAREGADEKMLQAALDWACGPGKVDCSALMQGQPCYDPDNVEAHATYAFNAYYHGMGMGSGTCYFSGVAVITTTDP

SEQ ID NO: 12353 - protein, 443 aa, Haloarcula marismortui ATCC 43049
MLIRNATLPDGRQRDVRVRGESIAEVGRDLDASDQHVIEATGKRLFPGMIDVHVHFRQPGYPHKETWESGSRSAAAGGVTAVVDQPNTDPPTIDGESFDQKAEFAADSVVDWGINGGVTADWIPNVLLRRRLFALGEVFLADSTGDMGIEADLFADALEAATDNDVPVTVHAEDADYFNDDAKARDDADAWSAFRTAKAEEKAVERACEVAQKHDATIHIAHTSTPEGVDIASEAGMTTEVTPHHLLLSRRDLSELGTFGRMNPPLRREKRRQKLYERVVDGTVDMIATDHAPHTREEKDAGIWDAPSGVPGVETVLPLLLAEARDPDSGLTYERVRDLTARNPADVFDIPQKGAIEAGKDADLVLVDTTETSEISGAALHSKCDWTPFEGHDAVFPEWTMVRGTVVYERGDALEADDSTAQEDVFYDHQGENVRGADSERLE

SEQ ID NO: 12354 - protein, 341 aa, Salmonella enterica subsp. enterica serovar Typhi Ty2
MKALSKLKAEEGIWMTDVPEPEVGHNDLLIKIRKTAICGTDVHIYNWDEWSQKTIPVPMVVGHEYVGEVVGIGQEVKGFKIGDRVSGEGHITCGHCRNCRGGRTHLCRNTTGVGVNRPGCFAEYLVIPAFNAFKIPDNISDDLASIFDPFGNAVHTALSFDLVGEDVLVSGAGPIGVMAAAVAKHVGARHVVITDVNEYRLELARKMGVTRAVNVAKESLNDVMAELGMTEGFDVGLEMSGAPPAFRTMLDTMNHGGRIAMLGIPPSDMSIDWTKVIFKGLFIKGIYGREMFETWYKMAALIQSGLDLSPIITHRFSVDDFQKGFDAMCSGQSGKVILSWD

SEQ ID NO: 12355 - protein, 388 aa, Salmonella enterica subsp. VII
QNGKLNVPENPIIPFIEGDGIGVDVTPAMLKVVDAAVEKAYKGERKISWMEIYTGEKSTQVYGQDVWLPAETLDLIRDYRVAIKGPLTTPVGGGIRSLNVALRQELDLYVCLRPVRYYQGTPSPVKHPELTDMVIFRENSEDIYAGIEWKADSADAEKVIKFLREEMGVKKIRFPEHCGIGIKPCSEEGTRRLVRAAIEYAITNDRDSVTLVHKGNIMKFTEGAFKDWGYQLARDEFGGELIDGGPWLKIKNPNTGKEIVVKDVIADAFLQQILLRPAEYDVIACMNLNGDYISDALAAQVGGIGIAPGANIGDECALFEATHGTAPKYAGQDKVNPGSIILSAEMMLRHMQWFEAADLIVKGMEGAIAAKTVTYDFERLMEGAKLLK

SEQ ID NO: 12356 - protein, 481 aa, Streptococcus mutans
MPITNKTMLITYADSLGKNLKELNENIENYFGDAVGGVHLLPFFPSTGDRGFAPIDYHEVDSAFGDWDDVKRLGEKYYLMFDFMINHISRQSKYYKDYQEKHEASAYKDLFLNWDKFWPKNRPTQEDVDLIYKRKDRAPKQEIQFADGSVEHLWNTFGEEQIDLDVTKEVTMDFIRSTIENLAANGCDLIRLDAFAYAVKKLDTNDFFVEPEIWTLLDKVRNIAAVSGAEILPEIHEHYTIQFKIADHDYYVYDFALPMVTLYSLYSGKVDRLAKWLKMSPMKQFTTLDTHDGIGVVDVKDILTDEEITYTSNELYKVGANVNRKYSTAEYNNLDIYQINSTYYSALGDDDQKYFLARLIQAFAPGIPQVYYVGFLAGKNDLELLESTKEGRNINRHYYSSEEIAKEVKRPVVKALLNLFTYRNQSAAFDLDGRIEVETPNEATIVIERQNKDGSHIATAEINLQDMTYRVTENDQTISFE

SEQ ID NO: 12357 - protein, 488 aa, Listeria monocytogenes str. 4b F2365
MADVRKLKNYINGEWVESRADKYEDVINPATGEVLCQVPISTRAELDQAAVIAEQAFEKWSQVAVPRRARVLFSFQQLLIQHKEKLARLITLENGKNLSEARGEVQRGIENVEFAAGAPTLMMGDSLASIATDVEAANYRYPVGVVGGIAPFNFPMMVPCWMFPMAIALGNSFILKPSERTPLLMEKLVELFSEAGLPKGVFNVVYGAHDVVNGILENEIIKAVSFVGSKPVGEYVYKTGSANLKRVQALTGAKNHTIVLNDADLEDTVTNVISAAFGSAGERCMACAVVTVEEGIADEFLAALRTAAQNVKIGNGLDDGVFLGPVIREENQKRTIAYIEKGLEEGAKLTVDGRETGLSEGHFVGPTILEDVTTDMTIWKDEIFAPVLSVIRVKNLQEAVRVANQSEFANGACIFTNNAKAIRYFREKIDAGMLGVNLGVPAPMAFFPFSGWKSSFYGTLHANGKDSVDFYTHKKVVTARYSLKGYEE

SEQ ID NO: 12358 - protein, 388 aa, Salmonella enterica subsp. houtenae
QNGKLNVPENPIIPFIEGDGIGVDVTPAMLKVVDAAVEKAYKGERKISWMEIYTGEKSTQVYGQDVWLPAETLDLIRDYRVAIKGPLTTPVGGGIRSLNVALRQELDLYVCLRPVRYYQGTPSPVKHPELTDMVIFRENSEDIYAGIEWKADSADAEKVIKFLREEMGVKKIRFPEHCGIGIKPCSEEGTRRLVRAALEYAITNDRDSVTLVHKGNIMKFTEGAFKDWGYQLARDEFGGELIDGGPWLKIKNPNTGKEIVVKDVIADAFLQQILLRPAEYDVIACMNLNGDYISDALAAQVGGIGIAPGANIGDECALFEATHGTAPKYAGQDKVNPGSIILSAEMMLRHMQWFEAADLIVKGMEGAIAAKTVTYDFERLMEGAKLLK

SEQ ID NO: 12359 - protein, 181 aa, Brassica napus
MASSMLSSAAVATSPAQATMVAPFTGLKSSAAFPVTRKSNTDITSIANNGGRVSCMKVWPPVGKKKFETLSYLPDLTDVELAKEVDYLLRNKWIPCVEFELEHGFVYREHGSTPGYYDGRYWTMWKLPLFGCTDSAQVLKEVQECKTEYPNAFIRIIGFDNNRQVQCISFIAYKPPSFTGA

SEQ ID NO: 12360 - protein, 222 aa, Pseudomonas wisconsinensis
MSIRRLACSLLLSSLALPVLAAECPAMLQGELPKLRAKGENIELCQYAGKPLVVVNTASFCGFTPQFKGLEALYQRYKDQELEVLGVPSDDFRQESADSKETATVCYVNYGVTFAMTEPQPVSGANAIPLFKGLAEQSRQPRWNFFKYVVDRQGKVVASFSSLTKPDDPELIAARREGDRLATLIPSRFTALHPSGRWALSVCLPRLARRRTQFTRRALQEQ

SEQ ID NO: 12361 - protein, 205 aa, Sulfolobus islandicus
YSIAKLASHKLWNLLNTEPYIATFGALTGSQAVEMAKAGLKAIYVSGWQVAADNNLSNQTYPDLSLYPSNSVPNLVKRLNNALLRADQISWSEGKRDIDYLLPIVADAEAGFGGPIHAFELTKALIEAGAAGVHFEDQLAAEKKCGHLGGKVLIPISAFIRVLNAARLASDVLGVPTILIARTDALNAKYLSNDVDETDNQFLTG

SEQ ID NO: 12362 - protein, 153 aa, Brassica napus
VHNRCPTCRQELGDIRCLALEKVAESLELPCKFYNLGCPEIFPYYSKLKHESLCNFRPYGCPYAGSECGVVGDIPFLVSHLRDDHKVDMHAGSTFNHRYVKSNPREVENATWMLTVFHCFGQYFCLHFEAFQLGMGPVYMAFLRFMGDEEEAR

SEQ ID NO: 12363 - protein, 175 aa, Triticum aestivum
MAPTVMASSATSVVPFQGLKSTVGLPVSRRSNGASLGSVSNGGRIRCLQVWPIEGIKKFETLSYLPPISREALLKQVDYLIRSKWVPCLEYSKVGFIFREHNASPGYYDGRYWTMWKLPMFGCTDATQVINEVEEVTKEYPDAYVRIIGFDNMRQVQCVSFIAFKPPGCEESGKA

SEQ ID NO: 12364 - protein, 318 aa, Zea mays
  unsure (1)..(318): unsure at all Xaa locations
MMDPALLDDVIRRLLEVKNLKPGKNAQLSESEIKQLCAAAKEIFLHQPNLLELEAPIKICGDVHGQYSDLLRLFDYGGYPPQANYLFLGDYVDRGKQSLETICLLLAYKVKYPENFFLLRGNHECASVNRIYGFYDECKRRFSXVKLWKTFTDCFNCLPVSALIDEKILCMHGGLSPELNKLEQILNLSRPTDVPDTGLLCDLLWSDPSNEATGWAINDRGVSYTFGPDKVSEFLEKHDLDLICRAHQGGEDGYEFFASRQLVTMFSAPNYCGEFDNAGAMMSVDETLMCSFQILKPARKVLGGSTNNKSGFKSLRGW

SEQ ID NO: 12365 - protein, 476 aa, Triticum aestivum
  unsure (1)..(476): unsure at all Xaa locations
ENGREEVGVMGVSSGGADGDEEQHGGGKFSVTSFLWHGGSVWDAWFSCASNQVAQVLLTLPYSFSQLGMLSGILLQLFYGFLGSWTAYLISVLYVEYRSRKEKEGVSFKNHVIQWFEVLDGLLGPYWKAAGLAFNCTFLLFGTVIQLIACASNIYYINDRLDKRTWTYIFGACCATTVFIPSFHNYRIWSFLGLGMTTYTAWYLAIAALINGQVEGVTHTGPNKLVLYFTGATNILYTFXGHAVTVEIMHAMWKPAKFKYIYLLATLYVFTLTLPSASAMYWAYGDELLAHANAFSLLPKTAWRDAAVILMLIHQFITFGFACTPLYFVWEKVIGMHDTKSVCLRALARLPIVVPIWFLAIIFPFFGPINSAVGALLVSFTVYIIPALAHMLTYRSASARANAAEKPPFFLPSWTGMFVLNAFIVVWVFVVGFGLGGWASMVNFIRQINTFGLFAKCYQCPKPGAAVAPGPSSLHH

SEQ ID NO: 12366 - protein, 374 aa, Chlamydomonas reinhardtii
MHAALQIGGCSAAGFAPVRCGGRKASALATPVRGCQLGCGASAQSPMRAGAALGPRRSGRRTAVVCRAAAKNFYDILGVSASATDRDIKSAYRKLAMKLHPDVNKAPDAQKRFMEVKVAYETLSDAKQRAEYDRRLRGGYAGGRTGYSGSSSSSGYGGAYGGNSAGNWGSSYGTGGGNYGNYTQEPLPGLDDLIKELEKEYTAWVRERATKTGPGGRPKTLAEELEDLGGEFLDFLEEALGIKEEAGSSSSSSAGGNGSSSSTGAAAGAAFRETSKSAAEQFDAWWQQYGDGSPLGGAGGSSGAGASPAGSRSTSSGASASSSSSASSSSSQQRRQQAPPPPPPRPPPPPPPKKSREEEIDAELLALKKKLNKL

SEQ ID NO: 12367 - protein, 205 aa, Sulfolobus islandicus
YSIAKLASHKLWNLLNTEPYIATFGALTGSQAVEMAKAGLKAIYVSGWQVAADNNLSNQTYPDLSLYPSNSVPNLVKRLNNALLRADQISWSEGKRDIDYLLPIVADAEAGFGGPIHAFELTKALIEAGAAGVHFEDQLASEKKCGHLGGKVLIPISAFIRVLNAARLASDVLGVPTILIARTDALNAKYLSNDVDETDNQFLTG

SEQ ID NO: 12368 - protein, 422 aa, Staphylococcus aureus subsp. aureus MSSA476
MTAEKITQGTEGLNVPNEPIIPFIIGDGIGPDIWKAASRVIDAAVEKAYNGEKRIEWKEVLAGQKAFDTTGEWLPQETLDTIKEYLIAVKGPLTTPIGGGIRSLNVALRQELDLFTCLRPVRWFKGVPSPVKRPQDVDMVIFRENTEDIYAGIEFKEGTTEVKKVIDFLQNEMGATNIRFPETSGIGIKPVSKEGTERLVRAAIQYAIDNNRKSVTLVHKGNIMKFTEGSFKQWGYDLALSEFGDQVFTWQQYDEIVEKEGRDAANAAQEKAEKEGKIIIKDSIADIFLQQILTRPAEHDVVATMNLNGDYISDALAAQVGGIGIAPGANINYETGHAIFEATHGTAPKYAGLNKVNPSSVILSSVLMLEHLGWQEAADKITDSIEDTIASKVVTYDFARLMDGAEEVSTSAFADELIKNLK

SEQ ID NO: 12369 - protein, 142 aa, Streptococcus thermophilus
MLNKIQHRNLNTYSVTPFDFFEEFSRNLFNDFKPNFIKTDIHETDNEYLVEAELPGIPKENIQVTYENGVLTISGQRQIDAVNEDKKGKLIRSERSLTSVQRQYLLENVKEDEIKASYSDGVLKVTLPKDSNKEIKKSISIE

SEQ ID NO: 12370 - protein, 426 aa, Clostridium thermocellum ATCC 27405
MLIKGGHVVDPKTNTNGIMDILVEDGIITEIGKDIEISNGDIIYAEGKLVLPGLVDAHCHLRDPGFEYKEDIETGTMSAAMGGFTSIACMPNTDPVCDNKAVVKYIINKAKQDGYVNVYPIGAISKGQKGEELSEIGELKFAGAVAISDDGKPVKSSSLMKRALEYSSMFDIAVISHCEDLDLADGGVMNEGYWSTVMGLKGIPSAAEEIMVARDIILSEYTKVPIHIAHVSTELSVELIRNAKKRGVKVTCETCPHYFVLTDEACKDFNTLAKVNPPLRTRRDVEAVIEGLKDGTIDIIATDHAPHHADEKNVEFNLAANGMVGFETALPLAITYLVKPGHLTISQLVEKMCVNPSKLLGINKGTLETGRSADITIVDLNEEFVVDVNKFKSKSKNSPFHGFKLNGSVYYTLVNGNVVVREKVLL

SEQ ID NO: 12371 - protein, 256 aa, Triticum aestivum
MAAKCYPTVSDEYLAAVAKAKRKLRGFIAEKNCAPLMLRLAWHSAGTFDVATKTGGPFGTMKCPAELAHGANAGLDIAVRLLEPIKEQFPILSYADFYQLAGVVAVEVTGGPEVPFHPGRQDKPEPPPEGRLPDATQGSDHLRQVFSTQMGLSDQDIVALSGGHTLGRCHKERSGFEGAWTANPLIFDNSYFTELLSGEKEGLLQLPTDKTLLTDPAFRPLVDKYAADEDAFFADYAEAHLKLSELGFGEAVEGCC

SEQ ID NO: 12372 - protein, 396 aa, Yarrowia lipolytica
MTFHSLVNKVSGQPPSYNKKADYKFGKTLGSRYFGIVKYAKQHSTGEEVAVKIIVKKNLKGNDHVVIEELSLLKECHHPHIIAFKDWFESKEKFYIVTQLATGGELFDRICDYGKFTEKDARQSVKDILEAVDYLHSKDIVHRDLKPENLLFVTPDPHASLVLTDFGIAKHLKSPDEVLHSMAGSFGYAAPEVLKGTGHGKPCDIWSLGVITFTILSGYSPFRSETVRDFLEEIEGPNALVFHKKYWQDVSEDAKDFIKSCLALDPALRPTSAELLKHEWITGDTTKSIDLLPNIREGFNARSKFRQAIEAVRLHNRIKSLNMVDSDDEDEEEEAVADTEKPSLLSVASSMRPRAHSRSKSGTGAAAFQEVVLAAKRNKELLEKEKASKQDAAEEK

SEQ ID NO: 12373 - protein, 381 aa, Staphylococcus aureus subsp. aureus COL
MLTEQEKDIIKQTVPLLKEKGTEITSIFYPKMFKAHPELLNMFNQTNQKRGMQSSALAQAVMAAAVNIDNLSVIKPVIMPVAYKHCALQVYAEHYPIVGKNLLKAIQDVTGLEENDPVIQAWAKAYGVIADVFIQIEKEIYDQMMWIGFKPFKITNIKQESEDIKSFTVETEEYDFSEFTPGQYITVDVSSDKLPYRAKRHYSIVSGEKNHLTFGVKRDVTTEHEGEVSTILHDEIKEGDMINLAAPVGGFVLENTTEPQLFLGSGIGVTPLVAMYEAASAKGLDTQMVQVAENEQHLPFKDNFNSIASHHDNAKLYTHLKDKQGYIGAEELQVFLANKPEIYICGGTKFLQSMIEALKSLNYDMDRVHYETFIPRLSVAV

SEQ ID NO: 12374 - protein, 435 aa, Arabidopsis thaliana
MKAPRLGSEEVSYSDRISYLPDDLLLRILSFIHTSDAISTSLLSKRWKFVWKMMPTLDLDEDSCRNIGTLRFDEGCCMFLKSHEAPVLTSLNLKLMTPSHDIDRLLSNIKPILHEITITSYRYSTIRFPRNLNVCQTLVVMKLQDKVLVDVSFPVCFRSLKSLHLTRVKYSCRESFTTLLSACPVLEDLDLFIGRVHYDCLNSFTIWVPSLQRLSICDESYRFRSTTFEISVPSLKYLKIACQDSCFKFVEDMPNLVEAHVEANQHETKNLLRFLTSVERLKDPDLTDRIFHQLLYLELHLHKRLNGDRILSLLKHSPNLQTLKLNEKPLRSIKDQPNISVRKPNSVPECLTFHLETLEWQGYAGRPEDKEIAVYILGNALRLNTATISRYFSSSRFRHHQKKDLKIVEELKSITKASTSCQLVLQQFIEIKYSM

SEQ ID NO: 12375 - protein, 178 aa, Glycine max
MQHRNLTSGRPSGTDGSDYSYRMVVDSRYQLVAKGKKRLSLYFITEAVLLLIGVTLTYLPGIEADAPNTVAYSSVIVSVVSLIIGNIGRRRSRSGLLRFYAAVSSIAMLLLIASLAQQHLLLKAIQDSKLWKTGKYDVNELSHFQIGLLLYMVTLSVLKLCTVNAVVSLLFNMALNPH

SEQ ID NO: 12376 - protein, 388 aa, Salmonella enterica subsp. diarizonae
QNGKLNVPENPIIPFIEGDGIGVDVTPAMLKVVDAAVEKAYKGERKISWMEIYTGEKSTQVYGQDVWLPAETLDLIRDYRVAIKGPLTTPVGGGIRSLNVALRQELDLYVCLRPVRYYQGTPSPVKHPELTDMVIFRENSEDIYAGIEWKADSADAEKVIKFLREEMGVKKIRFPEHCGIGIKPCSEEGTKRLVRAAIEYAITNDRDSVTLVHKGNIMKFTEGAFKDWGYQLARDEFGGELIDGGPWLKIKNPNTGKEIVVKDVIADAFLQQILLRPAEYDVIACMNLNGDYISDALAAQVGGIGIAPGANIGDECALFEATHGTAPKYAGQDKVNPGSIILSAEMMLRHMQWFEAADLIVKGMEGAIAAKTVTYDFERLMEGAKLLK

SEQ ID NO: 12377 - protein, 291 aa, Lactobacillus johnsonii NCC 533
MTEVPTITLNDGNKMPLLGLGVFQIPDHEKARQTVEMALANGYRMIDTAEVYENQIAVGEAIAESAVNRDDIFLTTKIWVSNMSFEKATKAIDHDLKELGTDYLDLVLLHQPYGDTFGAWNALAAAKRAGKVRSIGLSNFYPDQYMNLELAHEDKPAINQIEINPWFQQTNDVKFFQGRDVVVEAWAQFAEGKHDIFNNKTLKEIADAHHKTTAQVILRWLTQQDIVVIPKSVHEKRQKENLDIFDFELTKDEMDKIKGLDKGVSQFFDHRDPAVIDDIFGESLKQLRDSE

SEQ ID NO: 12378 - protein, 337 aa, Streptomyces kanamyceticus
MSSRAIVVERPGAHRLVTRGTPTPGPGEVLVRVAAAGICGSDREVYDGHRDAAYVRYPVIPGHEWSGTVAAVGEGVDPGLLGRRTVAEGFRACGVCERCRCAETNLCTGGYAETGFTEPGAFADHLTVPARLLHLLRDDADLRAAALLEPAAVVAAAVRAGGLRPGERVAVVGAGTLGLLAVQLLAASGPGELVVVDPRGARGARARECGATSALSPVAAESVRGSFDLVVETAGAPTTAASSCLLARRGGRVVLTGMFTEGAVGIDPVHLSLSQLEVRSVFGASSAAWGDAVRAFGLGLIDPAALITHEFPLERFGEAVSLVGGGDPKTGKVLLRP

SEQ ID NO: 12379 - protein, 383 aa, Pyrus pyrifolia
MSSSNAVGATSHELLGAQAQLWNHIFQFINSMSLKCAVQLGIADVIHNHGQPISLSELIAGLNVHPSKAHFVSRLMLILVHSNFFAQHHHVHHDRADVEEEEAVVLYSLTPSSRLLLKDGPFSTTPFLLATLDPVVTTPFHLMGAWLKINGGDDPGATCTPFEMENGMPFWELGAQEPRFGNLFNEAMEADSKLIGRVVVEECGGVFEGLKSLMDVGGGSGTMAKAIANAFPNINCTVFDQPHVVAGLQGTTHNLGFMGGDMFEEIPPANAILLKWIMHDWNDEESVTILKKCREAISLSKNEGGNKKIIIIDIVVGYVDNKKKMMDKKSIETQLMFDMLMMSILPGKERSKLEWEKIFFSAGFTHYNITHTLGLRSLIEVYP

SEQ ID NO: 12380 - protein, 388 aa, Salmonella enterica subsp. diarizonae
QNGKLNVPENPIIPFIEGDGIGVDVTPAMLKVVDAAVEKAYKGERKISWMEIYTGEKSTQVYGQDVWLPAETLDLIRDYRVAIKGPLTTPVGGGIRSLNVALRQELDLYVCLRPVRYYQGTPSPVKHPELTDMVIFRENSEDIYAGIEWKADSADAEKVIKFLREEMGVKKIRFPEHCGIGIKPCSEEGTKRLVRAAIEYAITNDRDSVTLVHKGNIMKFTEGAFKDWGYQLARDEFGGELIDGGPWLKIKNPNTGKEIVVKDVIADAFLQQILLRPAEYDVIACMNLNGDYISDALAAQVGGIGIAPGANIGDECALFEATHGTAPKYAGQDKVNPGSIILSAEMMLRHMQWFEAADLIVKGMEGAIAAKTVTYDFERLMDGAKLLK

SEQ ID NO: 12381 - protein, 502 aa, Triticum aestivum
MVATAKIPQRQLFIDGDWRAPALGRRLPVINPTTEASIGEIPAGTSEDVDAAVAAARAALKRNRGRDWSRAPGAVRAKYLRAIAAKMIERKSDLARLEALDCGKPLDEAAWDMDDVAGCFEFFAGHAEALDKRQNAAVALPENFKCHLKKEPIGVVALITPWNYPLLMAVWKVAPALAAGCTAVLKPSELASLTCLELGDVCKEIGLPSGVLNIVTGLGHEAGAPLSSHPDVDKVAFTGSYATGQKIMVAAAPTVKPVTLELGGKSPIVVFDDVDIDKAVEWTLFGCFWTNGQICSATSRLLIHKNIAKEFVDRMVAWSKNIKVSDPLEEGCRLGPVVSEGQYEKIKKFVANAKSEGATILTGGVRPKHLEKGFFIEPTIITDINTSMEIWREEVFGPVLCVKEFSTEEEAIELANDTHYGLAGAVISGDRERCQRLAEEIDAGCIWVNCSQPCFCQAPWGGNKRSGFGRELGEGGIDNYLSIKQVTEYTSDAPWGWYKAPA

SEQ ID NO: 12382 - protein, 388 aa, Salmonella enterica subsp. arizonae
QNGKLNVPENPIIPFIEGDGIGVDVTPAMLKVVDAAVEKAYKGERKISWMEIYTGEKSTQVYGQDVWLPAETLDLIRDYRVAIKGPLTTPVGGGIRSLNVALRQELDLYVCLRPVRYYQGTPSPVKHPELTDMVIFRENSEDIYAGIEWKADSADAEKVIKFLREEMGVKKIRFPEHCGIGIKPCSEEGTKRLVRAAIEYAITNDRDSVTLVHKGNIMKFTEGAFKDWGYQLARDEFSGELIDGGPWLKIKNPNTGKEIVVKDVIADAFLQQILLRPAEYDVIACMNLNGDYISDALAAQVGGIGIAPGANIGDECALFEATHGTAPKYAGQDKVNPGSIILSAEMMLRHMQWFEAADLIVKGMEGAIAAKTVTYDFERLMDGAKLLK

SEQ ID NO: 12383 - protein, 324 aa, Streptomyces kanamyceticus
MAAQTLRAAARMRVVELIGDKERTAAEVAAEAGARPEGMIRLLRALAGIGVVAERTPGVFAVTPTGALLDSRRPGNVASLVLMMSDPTMLRGWEHLDEVVRTGEPAFDTVFGTDFFGHLREHPEESARFNEAMSQSTGAAAATLPRAFDFTRFATVADVGGGDGTLLSAVLKEHTGLTGIIYDTAEGLAQAPATLERHGLTERCSSVAGDFFQSAPKGADLYLLKSILHDWPDERAVTILSHCRAVLPPEGRVLILEHVLPEAVDPAAPGFAYLSDLNMLVNLGGRERTRADFDELCGRAGLSIVSVTPMGAPNPLSMIEVAAA

SEQ ID NO: 12384 - protein, 1265 aa, Neurospora crassa
MTWHAQLALVLALVCPAAASCSGKSDACSSNPIPLRQFNALNYQADTCNLKWNRGCTSLDKHGVLQQKPPPYSLCNSGHQPAGLIPVDAYTLSLQNNNFAPGSAKWTLHGLWPGSVDGTGGKNQPYGCLNGEGFNETILTTFDGLLNYFWPTNAKFNNTMQCFILSEWMKHGTCAVIPGADGTAFRLPQEDYFRTAFVIANEFNESPTLRNQLLEKVKLDDVEPLISTRCVQCAYLATVGWTGTDVASVPRMSGDCIDQCFECGDFWDTCPPAQLESTVMLNSSNAPREKRDSSSTSNATASFPLLEFAMPAFMSSENTSPWEGTWRSFGAEEGGSGKFEFAQTFTDNVLTVTTDSPYPRTCTYERRGPKELVLRCGGDHLEDCLVQRLPDIGGLEAAFLACNHTGEPAPASFYAAMDTKGCGNFLMFRCKASAAGCSFSPDAISASEPKTETKTEPESGFESESKPSPVSHFQPGIAGAPPALLGSWRSLQVSSDYEEGLAQWNFTADGQASLRWPNYPNRAVQRYSVSHSDEDPSLVLLASASGTITTCRFQFQYQPVYSYAVLDCGAAVDNEEVTQVTKWAMGRCNPCSAHCRYSCGPENDFCGAGSCDPAESVEAASVDALPSLFDITRATLKDGHDWCTPEDSGCWPTKTAIRKLEQELDPTVPRLGLRWHSYPDPQPAPVPMGSIDNQSFYGLGNAPQGLKALYYYEDIAEMQRPCFNQADPPAVYNTASDMCKAAVHQNEYRNWNPFIVVFPLNERHVVAALNFAARHRLCIATAGTGHEYNSRNSCPTGGILIRTILLKDKTFMPTWPEDSTLAPAGAFRFGAGSTFAEMHAFSKDYSRVISSGWCSTVGMVGFHLGGGHGPFAPSMGLGVDNVLEIEVLQVGRNTYGQPVVHKKIASRNRNPQLFWAMRGGGGSVWGVVLSMTIRAHPVPDGGLSRVYMSQTGTFCPDDSSKFGYQWLRGMWTRFTAWQLSLNQKVSTQPGFFINTTLYNEKRNLCSVTWEFKFEYFYAGGQAEQDYIRFRDGLKDVLQTDTVWEDNYKSAYDYLVSMAADKFTLVPVNPLPAQHPPSDVATGSQNSVLVSRQALKTKFTSTMMDVLDICVKSLKNPDKTSPDVSGYRCGFHYLYTSLTGNLGSTQPGDTAISPGFRSALMLWNARTLTTQQSNDTVYKLGPNSYFSESSYVMHNWTARYWGEKAYEQLLGVKKAHDPGNHFWCHHCVGDNPDDAFGEPLGAAAQADFGDQPDAAAQAEFVEQEKL

SEQ ID NO: 12385 - protein, 167 aa, Glycine max
  unsure (1)..(167): unsure at all Xaa locations
MAAAFASRCSRVGRSLSGGLSNSSPGLFTSSHGMTCNNLFSQQQRTFIQMRTVLKVVDNSGAKKVMCIQALKGKKGARLGDTIIASVKEAHPNGKVKKGKVVYGVVVRAAMILTFAGHSEVKFNDNAXVVLVMKSSVTSAICVFGPVPHELRQKKHVKILTLAGHIA

SEQ ID NO: 12386 - protein, 199 aa, Zea mays
  unsure (1)..(199): unsure at all Xaa locations
ESHTTGGESDQQKRPXPSGGPQAGAAGHXARSGAQQGXRAATAGPRXXDDGAGTXGSAGGKRXXEAGKTDXXEXEATDHSGGRKHKTNXAGSNDEAGANRAEGENGGKTNPSRPSXNATPKRRNGRTDXDYXAQNXDKEDXGXHEEDHXQKRSEXADSAEEKGEKHAAXAHARGRDDXTSPAXQRXNEHQPNGPATPAD

SEQ ID NO: 12387 - protein, 253 aa, Glycine max
LGHVIDKLSVSFGLEILKVVPGYVSTEVDARLSFDTAATIARAHRIIDLYEKAGIKKDRVLIKIASTWEGIQACKHLQKEGISCNMTLLFGFAQAVGCAEAGATLISPFVGRILDWHKAKTGKSSYESHEDPGVVSVTKIYQYYKKYDYKTIVMGASFRNTGEITELAGCDRLTISPGLLEELAKSTSKLDKKLDPETAAKAYTGEKVSYDEKGFRLSMNEDAMATEKLAEGIRGFSADIVKLEQILKAKLSA

SEQ ID NO: 12388 - protein, 182 aa, Burkholderia cepacia R18194
MLWLTGLSGAGKTTLADAVAARLSDRCMHPVVLDGDRLRTGLNRDLGFTVQDRFENVRRIAEVAALLSESGALAIVAVISPLAAMRDEAKAIVGPAFREVYVSTALACCETRDPKGLYAKARRGALPEFTGVSAPYEPPVAADLEIDTGRASLATCVDTLMQFACAQFVRAADARAALMRHG

SEQ ID NO: 12389 - protein, 345 aa, Methanosarcina mazei
MHHNVFTNTPTIPIDVKDRSVSELMDGMLRTGFQGRKLAESVQAWSNMLKEKDTTVLMGLSGAMVPAGMRRVISYLIRERMIDCLVSTGANLFHDSHEALGRKHYVGSHLANDEKLFEHGVDRIYDVFAVEEEFRNADNLIADFAEEIGEISCSSREFMYLLGKELVRRGAAEDSIVVSAYRHNVPIFVPALSDSSIGIGLTIARRRGLKLEIDQIKDVDEITQIVEKSGHTGVVYVGGGVPKNFIQQTEVIASILGMDVPGHEYAIQYTSDSPHWGGLSGCTFDEAVSWGKVAAQAKKVQVFVDATIALPIVAHALHEKTRGVKRTAPVFSWDGPEGLEIAYNE

SEQ ID NO: 12390 - protein, 290 aa, Brassica napus
  unsure (1)..(290): unsure at all Xaa locations
KKRPLFDTSNTWAFVFGLMGNGGSFAVFLSPVPTFYRVWKKKTTEGFQSLPYVXLFSATLWLYYATQKKDVFLLVTINSFGCFIETIYISIFLAFAPKKARMLTVKLLLLMNFGGFCLILLLCQFLAKGITRAKIIGRPTRPICVGFSVCVFAAPLSIIRTVIKTRSVEYMPFSLSLTLTISAVVWLLYGLALKDIYVAFPNVLGFALGALQMILYVVYKYCKTPPHLGEKEVEAAKLPEVSLDILKLSTVSSPEVRQANKCTCGNDRRPEVEDGQNAKNGKQSSSASAT

SEQ ID NO: 12391 - protein, 336 aa, Pyrococcus furiosus
MPKPKEYVLKKSEEIEGTKVEGPWLDDTKSLEEVVSLYTQIGFQATHLGKAIEIWRKIEEKREKGEEIRVFLGYTSNIVSSGLREIIAWLVKHRKVDVIVTTAGGVEEDFIKALKPFILGDWIVNDAELRKKGINRIGNIFVPNDRYIEFEKYMIPFFERILEIEREKGRPLTASEFIYELGRFMDEKLGKEKEKSIIYWAYRNEIPIFCPAITDGSIGDMLYFFKEERRDRELIIDIANDIVKLNNLAVTAKETASIILGGSLPKHAIINANLFRGGSDYAIYITTAVPWDGSLSGAPPSEGVSWGKIRAKADYVEIWADATLVFPILVWMVMKR

SEQ ID NO: 12392 - protein, 113 aa, Bartonella sp. Ac1692yn
ANEACLKMLQEIGSIKRIPEFIARAKDKNDPFRLMGFGHRVYKNYDPRAKIMQKTCHEVLKELNIQDDPLLDIAIELEKIALSDEYFIEKKLYPNVDFYSGITLKALGFPTEM

SEQ ID NO: 12393 - protein, 1188 aa, Neurospora crassa
MEWLSEFHTHLWKRAAEELNKNIKLINESDDPRIGSGRDGASGGTLSHSSGDNKDPASLSALGSTFVPVLVYAAICLLIFFTFRRISTRTYAPRTIAQLREPEHPAQTLPNGWIDWVKPFWKIDDDYILNNCSLDGYLFLRFLKILSVICFAGLAISWPILLPINATGGNLQRQLDKLTMGNIKLPSKYYAHVVVAWLFFGFVLFMVCRECIYYINLRQAYLLSPNMSNRLSARTVLFTCIPKPYLDEAKLRKLFGDSVKNIWIPKNTNYLRGLVEDRDDVAERLEKAEIELIKKANTVRMKNIREGKGAPPFAGEPAIDDLQSSKTSSSSLHESNESTQDGDLEKGTEPNPVRIRERRTEAPPIPVDEIETPALPGDDPGAPKKSKDDDLGPEYQHPYGYPASLPDVRGSVAALFVRANDRPHHRPLHNFGRRVDTIRWTRARLKVLNRDIWKLRRKFRAGDGQPLSSAFVEFDSQASAEAAYQILSHHQPMHMSPRYIGVRPEQVIWSSLRIRWWEQIMRQFLMLALVVVAIIFWSIPSAAVGIISNIDFLSEKVPFLFWIPLLPKVILGVIKGLLPAVALSMLMAIVPAGLRVCARVAGCPSHALVELYCQSAYFAFQVIQVFLVTTITSAASAAIIDVIKQPMSAPNLLAQNLPKASNFYLSYILVQCLGAGAGKLANVSDLLRHYVATSFMVDPRKAYHRWRKLTPIHWGAVYPRFTNMGVIALAYSCISPLILVFAGFGMLFVGLVYRYNLIYIHDDSELDTKGLLYPRALLHLMVGLYIAEICLIGLFALKKAFGPMLLMILFFGFCAITHYSLSSALSPLLASLPQTLALEKQHGQIAEDGDGDDHDINPVSRPTPSDPTSAQGGGGLAADYYNDTSISTPGADIPAEVIGGSAADYYASISFDYSDPSTDDPEPPGLYDDDFDSDGPQSQRMRGLEGSSSIRHSITEFAKTTLKSQLSNLKASANGTGPPGRLSPFTRFLYRIHRFLTPDPSIQNPNLIQRWLHPSVYADFRTLAKKVGNGPGPDGWELPKGYENKRGYYPPEMWKPAPRLWIPRDTGRVSRQEVRHNRDAGVWCTDVGCWLDDGVGEAPWDDGKDKRGSSEDSEKGVEGENMRGTEAEPESKEGKAMDLEDGKKVNRKGIWKGVGKEAKKATGRVKPGRVRVRFNVEEGPMGEERWLF

SEQ ID NO: 12394 - protein, 483 aa, Acinetobacter sp. ADP1
MQHVQLLIDGQSVDAANQATFERISPIDGHVASVAAAATLEDVDRALESASRAFQIWSKVSPTERRLRLLKAADLMDQNTEKFIEIGMRETGSTATWYGFNVHLAANMLREAAAMTTQIDGSLIPSDVPGNLAMGIRVPCGVVVGIAPWNAPVILPTRALAMPLACGNTVVLKASEACPATHRLIGAILNEAGLGEGVVNVITHAPQDAPQVVERLIEHPAVKRINFTGSTKVGKIIAETAAKHLKPVLLELGGKAPVVILNDADLDEAVNAVAFGAFFNQGQICMSTERVLVQDGIADRFIEKLIQKTASLKAGNPTQQGSMLGVLESRRAAERIQHLLEDAQQKGANLPLGIQIQDTLMQPTLVLDIQPEMLLYREESFGPVCTVQRFASIEDGVRLANDSEFGLSSAVFSQNFGLAMDVAKQIDSGICHINGATVHDEAQMPFGGTKSSGYGRFGSKASIAEFTELRWITVQTQPRHYPI

SEQ ID NO: 12395 - protein, 447 aa, Methanosarcina acetivorans C2A
MTEIGIVAVGGYNEMGRNMTAIIIGEDIVILDMGLRLDRVQIHEDVEIDKMHSLELIEMGAIPDDTIMKEINGTVRAIVCTHGHLDHIGAIPKLAHRYNAPILATPYTAAIIKQQIESERKFEVCNRVIPLPAGGTYQVTEDISIEFIRVQHSIIDCILAAVHTPAGAVLYACDFKLDRTPTMGEAPDFDRFKSLGKEGVIAMITESTNAGRSGKTPSEQIAKDMVRDVLLGTEESDVGMIITTFASHIARLKAIIEAAEEMGRIPVLMGRSMERYVGAARDLGYLELPSNVEIYGMRKDIDRAFKRIMQDGKNKYLPIVTGHQGEPGSILVRVANGETPYTIEPGDRIIFSANVIPSPMTQANRYALETKLKMKGGRIYDNVHVSGHAYREDHWELLRMVNPEHVIPAHGDMEMHGHYIEMAEDAGYVLGDTVHLLRNGEVLYIEE

SEQ ID NO: 12396 - protein, 492 aa, GIBBERELLA ZEAE PH-1
MAEITITGAGGRKIQIPTGLFINNRFIPSTTSETLTTENPTTNTPLGQVSAAQPSDVDAAVSSSKEALKTWKTSQPAERRRLLNRLADLIERDARELASIEAIDAGMLFNMSLGFCIVQAVETLRYFAGWADKIDGQSLEFDQGLAYTKREPIGVCAAVVPWNTPLLITAWKLGPALAAGNTLIIKTPELAPLYGQKLAQLVLEAGFPPGVVNIITGLGPVAGQALADHHQVRKISFTGSLAVGRTILVSAAKSNLKRVTLELGGKGPSIIFNDANFENALAFATAGITMHNGQICAAGSRIYVQADVYDRFVSEFAAKTRDAVMGDPLLDDTVKGPVISSTQKNRIMEYITKAKSEGIELLHGSAEPDSKGNFVPNTAFINVSPTATIMREEVFGPVASFAKFKTEEEVISLANDNEYGLAAAVFTNDISRAVRVSDQIEVGIVFVNTWGSISANSPFGGIKQSGFGRENGTDALNDWTQVKCVKINVFNL

SEQ ID NO: 12397 - protein, 178 aa, Zea mays
MASSMISSPAVTTVNRAGAGMVAPFTGLKSMAGFPTRKTNNDITSIASNGGRVQCMQVWPPIGKKKFETLSYLPDLDDAQLAKEVEYLLRKGWIPCLEFELEHGFVYREHNRSPGYYDGRYWTMWKLPMFGCTDASQVLKELQEAKTAYPNGFIRIIGFDNVRQVQCISFIAYKPPGF

SEQ ID NO: 12398 - protein, 76 aa, Triticum aestivum
MGLCSCCCRCLEIMCAILLPPLGVCLRHGCCSMEFWISVLLTILGYLPGVLYAAYVICSVDPDRVRRHDDDYIYVA

SEQ ID NO: 12399 - protein, 340 aa, Burkholderia fungorum LB400
MTLGDTIKGMVGMDPTGHADPDMKAVLDALRSLDPKPIEDCTVAEARQQPTPADAVRKLMSDPAFSARPSLELEAVRTEDIMIPGATGSNPARVYTPQGEGPFPLILYFHGGGWVLADLDTYDATPRSIAAQSRAIVVSAHYRQAPEHRLPAAHEDAFAAWRWVVEQAPKLCGDAGKIAVMGESAGANLAINVAIHARDTGVRMPMHQALIYPVASNNIVSISYEENRNARPLNKPMMLWFLHNVINSESDLTSSLIDVVSADLSRLPPAVVVTAGIDPLRSDGEKLAQKLHSAGVPVEHRNYRGATHEFFGMAAVVQAARDAQAFVSLAQRQAFGGAPL

SEQ ID NO: 12400 - protein, 343 aa, Mycobacterium tuberculosis H37Rv
MRIGVLTGGGDCPGLNAVIRAVVRTCHARYGSSVVGFQNGFRGLLENRRVQLHNDDRNDRLLAKGGTMLGTARVHPDKLRAGLPQIMQTLDDNGIDVLIPIGGEGTLTAASWLSEENVPVVGVPKTIDNDIDCTDVTFGHDTALTVATEAIDRLHSTAESHERVMLVEVMGRHAGWIALNAGLASGAHMTLIPEQPFDIEEVCRLVKGRFQRGDSHFICVVAEGAKPAPGTIMLREGGLDEFGHERFTGVAAQLAVEVEKRINKDVRVTVLGHIQRGGTPTAYDRVLATRFGVNAADAAHAGEYGQMVTLRGQDIGRVPLADAVRKLKLVPQSRYDDAAAFFG

SEQ ID NO: 12401 - protein, 664 aa, Zea mays
MSPSNPLPPPGETRVGCSLPSPVTPQAMGGGPARHVAMRALRARFLSRQREGGPAAASTWWWCASGSAKGDMESTLKGIRGSDAPCVLDLDDAATVAGGVEDTYGEDRATEEQLVTPWTVSVASGYNLLRDPRYNKGLAFTERERETHYLRGLLPPAIVSQELQERKIMNNIRQYQLPLQRYMALMDLQEGNERLFYKLLIDNVEELLPIVYTPTVGEACQKYGSIFSRPQGLYISLKEKGKILEVLKNWPERSIQVIVVTDGERILGLGDLGCQGMGIPVGKLSLYTALGGVRPSACLPITLDVGTNNEELLNDEFYIGLRQRRATGQEYTDFLQEFMTAVKQNYGEKVLIQFEDFANHNAFDLLARYGTTHLVFNDDIQGTASVVLAGLIAAQTLLGGSLADHTYLFLGAGEAGTGIAELIALEISRQTKAPIEECRKKIWLVDSKGLIVSTRKESLQHFKKPWAHEHKPLSNLLDAVNAIKPTVLIGTSGKGQTFTKDVVEAISSFNERPIILALSNPTSQSECTAEQAYTWSKGQAVFATGSPFDPVEYNGKIHVPGQANNAYIFPGFGLGVVMSGAIRVHDDMLLAASEALAQQVTEENFEKGLIYPPFSNIRKISAHIAASVAAKAYELGLASRRPRPKDLVKYAESCMYSPIYRNYR

SEQ ID NO: 12402 - protein, 145 aa, Vibrio vulnificus YJ016
MLRILNRTLLSTWLVLFVAFVSFSSQAQNENTSSNHVDLFQFHNVELQERAIRLSKELRCPQCQNQNLLESNAQVARDLRFIVYSQINDGKSDQEVVDFMTSRYGNMVLYNPPINSSTLLLWIFPVVILIIFFVISIRNIHTKRM

SEQ ID NO: 12403 - protein, 413 aa, Rickettsia sp. BJ-90
IAELKIRGKIFKLPILKASIGEDVIDISRVSAEADCFTYDPGFMSTASCQSTITYIDGDKGILRHRGYDIKDLAEKSDFLEVAYLLIYGELPSGEQYNNFTKQVAHHSLVNERLHYLFQTFCSSSHPMAIMLAAVGSLSAFYPDLLNFKEADYELTAIRMIAKIPTIAAMSYKYSIGQPFIYPDNSLDFTENFLHMMFATPCTKYTVNPIIKNALNKIFILHADHEQNASTSTVRIAGSSGANPFACISTGIASLWGPAHGGANEAVINMLKEIGSSEYIPKYIAKAKDKNDPFRLMGFGHRVYKNYDPRAAVLKETCKEVLKELGQLDNNPLLQIAIELEAIALKDEYFIERKLYPNVDFYSGIIYKAMGIPSQMFTVLFAIARTVGWMAQWKEMHEDPEQKISRPRQLYTG

SEQ ID NO: 12404 - protein, 414 aa, Shewanella oneidensis MR-1
MSDIRQQALDYHEFPVPGKTAVCLTKPAETSHDLALAYSPGVAEPVREIAANPENAYRYTNKGNTVAVISNGTAILGLGNLGPLASKPVMEGKALLFKHFANIDSTDIEVTHNTAQEFINTVAAIAGTFGGINLEDIKAPECFVIERELIARCNVPVFHDDQHGTAIVTAAGMINALEIQGKLISDAIFVCMGAGAAAIACMTMLVKCGANRANIYMLDTKGVIHSGRTDLNEYKALFANETDKRTLQDVIKGADVFLGLSGPNVIGAEEVAMMADKPVIFACSNPDPEIKPELAHATRSDLIMGTGRSDYPNQVNNVLCFPFIFRGALDVRASCINDEMKIAAVHAIAELAKEAVPASVLKAYPKVSSLSFGSEYVLPKPMDPRLLPRVARAVAKAAIDSGVATITTLPKYAD

SEQ ID NO: 12405 - protein, 75 aa, Glycine max
SGPICYQRNRAGAGMVAPFTVLKSMAGFPTRNTNNDITSIASIVGRVQCMHVCPPIVKKKFETLSYLSDLDYAQL

SEQ ID NO: 12406 - protein, 388 aa, Salmonella bongori
QNGKLNVPENPIIPFIEGDGIGVDVTPAMLKVVDAAVEKAYKGERKISWMEIYTGEKSTQVYGQDVWLPAETLDLIREYRVAIKGPLTTPVGGGIRSLNVALRQELDLYVCLRPVRYYQGTPSPVKHPELTDMVIFRENSEDIYAGIEWKADSADAEKVIKFLREEMGVKKIRFPEHCGIGIKPCSEEGTKRLVRAAIEYAITNDRDSVTLVHKGNIMKFTEGAFKDWGYQLARDEFGGELIDGGPWMKIKNPNTGKEIVVKDVIADAFLQQILLRPAEYDVIACMNLNGDYISDALAAQVGGIGIAPGANIGDECALFEATHGTAPKYAGQDKVNPGSIILSAEMMLRHMQWFEAADLIVKGMEGAIAAKTVTYDFERLMEGAKLLK

SEQ ID NO: 12407 - protein, 483 aa, Rickettsia rickettsii
MAEFTPITIAYGDGIGPEIMEAVLYILRKAEARIRLETIEVGEKLYKKHYTSGISEESWESIQRTGIILKAPITTPQGGGYKSLNVTIRKTLQLFANIRPAVSFHPFTRTLHPNLNLTIIRENEEDLYAGIEYRQTHNMYESMKLISHTGCEKIIRYAFEYAVKNNRKKVMCLSKDNIMKFSDGVLHKVFNEIAKEYPQINNAHYIIDIGTARLATKPEIFDVIVTSNLYGDIISDVAAEISGSVGLAGSANIGQHYAMFEAVHGSAPDIAGKDIANPSGLLNAAIMMLVHIGQGDIATLIENAWKKTIEDGVHTADIYNEQSSSKKVGTKEFAEEVTKRLGQLPTKLPKADYPLIAEKQESNIDYKIDTKEVKKLVGTDIFVNMNVSSAHDIADKINKLDLGNFELKTISSKGLKLWPRDTRFETVSDHWCCRFMNKDGTEIKHLDITRLLEALSTANIDFIKVENLFEFDGVAGYSLAQGE

SEQ ID NO: 12408 - protein, 388 aa, Citrobacter koseri
QNGKLNVPENPIIPFIEGDGIGVDVTPAMLKVVDAAVEKAYKGERKISWMEIYTGEKSTQVYGQDVWLPAETLDLIRDYRVAIKGPLTTPVGGGIRSLNVALRQELDLYVCLRPVRYYQGTPSPVKHPELTDMVIFRENAEDIYAGIEWKADSADAEKVIKFLREEMGVKKIRFPEHCGIGIKPCSEEGTKRLVRAAIEYAIANDRDSVTLVHKGNIMKFTEGAFKDWGYQLARDEFGGELIDGGPWVKIKNPNTGKEIVIKDVIADAFLQQILLRPAEYDVIACMNLNGDYISDALAAQVGGIGIAPGANIGDECALFEATHGTAPKYAGQDKVNPGSIILSAEMMLRHMQWFEAADLIVKGMEGAIAAKTVTYDFERLMEGAKLLK

SEQ ID NO: 12409 - protein, 92 aa, Glycine max
ATFTGLKSMAGLPIRKTNRVISCTASNGGRMQCMQVMSPLGTKKFETLSYMTDLDDAQSAKEVEYLFTKGWINCLEIQLEHRVLYLEHNMSP

SEQ ID NO: 12410 - protein, 476 aa, Bordetella pertussis Tohama I
MHANFIDGAWLDGVDARPNINPSNLADVVGDYAQADAAQAGMAIAAASAAAHAWARSTGQRRADVLDAVGTELLARKEELGRLLSREEGKTLPEGVSEVTRAGHIFKFFAGEALRIQGEKLPMTRPGIEVDVTREPVGVVGIIAPWNFPIAIPAWKIAPALAYGNTVVFKPADLVPGSAWALAEILSRAGLPAGVFNLVMGRGSVVGQAILDDRRVNAISFTGSVATGRRVAEAAIGRMAKVQLEMGGKNPLVVLNDADLKVAVDCAVNGAFFSTGQRCTASSRLIVQKGIYPRFVEAVRERLQGLKVDDALAPGTDIGPVVDRSQFDQNLAYIAIGREEGAQLAWGGEPLKRANEGYYLAPALFVDCDNSLRIAREEIFGPVAAVIPVDSYEQALEVANDTEFGLSSGIVTTSLRHATHFKRESQAGMVMVNCPTAGVDYHVPFGGRKGSSYGPREQGRHAAEFYTSVKTAYTAA

SEQ ID NO: 12411 - protein, 395 aa, ASPERGILLUS NIDULANS FGSC A4
MSGQQDNAPPSSATNAVLVASEPVPEGTHKVSGVDFEKYQGRDITVAEMVDNMKHMGFQSSAVADAARIINEMCSFPQRAYRHPETGDKTTIFLGYTSNLISSGLRDTIRYLVRHRHVSAIVTTAGGVEEDLIKCLAPTYMGSFTAPGAGLRAKGLNRIGNLIVPNSNYCSFEDWLVPILDKMLEEQEAANKKARETGNEEDELHWTPSRIIERLGREINHEDSVLYWAAKNNIPIFCPALTDGSLGDMLYFHTFRASPLRLRVDIVDDLRRINTMAVRAARAGMIILGGGIVKHHIANACLMRNGAEHAVYINTAQEFDGSDAGARPDEAPPLHEQDNKVPLKRNPTIDNDNAQQIDSTQSAEHPRHTFGIRSPGSERTSRKAGVGTAREQNQR

SEQ ID NO: 12412 - protein, 664 aa, Zea mays
  unsure (1)..(664): unsure at all Xaa locations
MISARTAAASPASLWKQGGRSEGGGSCDGCRTYRNTLRRAAAAKVRALPSRAVEAVKMGSAAEMEQEEAEVAAAAAGVVVEDHYGEDSATEELPILPWAFSVARYVSFSWLKKYAEESYFYISGYTLLRDPHHNKGLAFMEKERDAHHLRGLLPPAVVPQELQIKKIMHNLRQYQVPLQRYMAMMDLQERNERLFYKLLIDNVEELLPVVYTPTVGEACQKYGSIFRQPQGLYVSLRDKGKVLEVLRNWPHRNIQVICVTDGEAILGLGDLGSQGMGIPVGKLALYTALGGVRPSACLPITIDVGTNNEKLLNDEFYIGLRQKRATGEEYHELMEEFMAAVKQIYGEKVLIQFEDFANHNAFNLLAKYSKSHLVFNDDIQGTASVVLAGLLAALKVVGRTLAEHTYLFLGAGEAGTGIAELIALEISKQTSAPIEECRKKIWLVDSKGLIVDSRKNSVQSFKKPWAHEHEPLTTLYDAVQSIKPTVLIGTSGVGRTFTKEVVEAMASFNERPIIFSLSNPTSHSECTAEEAYNWTQGRAIFASGSPFDPVEYDGKVFVPGQSNNAYIFPGFGLGLVISGAIRVHEDMLLAASEALAAQATQENFDKGSIFPPFTNIRKISARIAAAVAAKAXYELGLATRLPPPRDLVKYAQSCMYTPVYRNYR

SEQ ID NO: 12413 - protein, 304 aa, Brassica napus
  unsure (1)..(304): unsure at all Xaa locations
MVFVKPQKKQAYFKRYQVKFRRRRDGKTDYRARIRLINQDKNKYNTPKYRYVVRFTNKDIIAQIVSATITGDIVLASAYAHELPRYGLKAGLTNYAAAYCTGLLLARRVLQMLEMDAEYEGNAEATGEDYSVEPTDTRRPFRALLDVGLVMTTTGNRVFGALKGALDGGLDIPHSDKRFAGFNKEGKNLDAEIXHRKYIYGGHVADYMKLLMEDEPEKYQSHFSNYLKKDLAPENMEEMYKNVHAAIRADPSIKKSDKEAPKEHKRYNPKKLTYDERKASLIQRVKALNSAIGGDDNDEDEDDE

SEQ ID NO: 12414 - protein, 112 aa, Bartonella sp. Ac1825yn
NEACLKMLQEIGSIKRIPEFIARAKDKNDPFRLMGFGHRVYKNYDPRAKIMQKTCHEVLKELNIKNDPLLDIAMELEKIALNDKYFIEKKLYPNVDFYSGITLKALGFPTEM

SEQ ID NO: 12415 - protein, 453 aa, Methanopyrus kandleri AV19
MEPLTVEVFAVGGYGEAGGRNMTAVRVDEEIVIFDCGMSLDKSLVFEKDFQKASARELRRVKAIPNDPILRPHRSKTVAAVLSHAHLDHIGAVPKLLFKYKCPVFGTEFTIELVKADLRNEIRYADEAEDIMINLYTVEPGDEVQISSKLRLEFIPISHSIPCCVLPVLHTPYGAIVYACDFKFDDNQIIGYKPDYKRLKQLGKEGVLLLITESLRVAEEIKTPSESVAREMVNDVLRFADEESEGIIVTTFSSHIERIQAIADTADRLGRKVILAGRSMGKYGRIAEELGLLNLPAGARIYDRPETIRRGLERANKEKEDYLLIVTGHQGEPGAVLPRIVDGELPYRLTEEDSVVFSSSTIPSPINRANRYVLDTKLRLKGVKMFKDVHVSGHAGREDHRLMLRMLQPEFIVPAHGDPDMLAAYAELATQEGYEVNRDVFIMFDGTKLSLPL

SEQ ID NO: 12416 - protein, 329 aa, Emericella nidulans
MDNNMEIDAARSPEPHHLSPTTDPGSIPTLDGWIESLMTCKQLAEEDVRRLCDRAREVLQEESNVQPVKCPVTVCGDIHGQFHDLMELFRIGGPNPDTNYLFMGDYVDRGYYSVETVTLLVCLKIRYPQRITTLRGNHESRQITQVYGFYDECLRKYGNANVWKYFTDLFDYLPLTALIENQIFCLHGGLSPSIDTLDNIRSLDRIQEVPHEGPMCDLLWSDPDDRCGWGISPRGAGYTFGQDISEAFNHNNGLTLVARAHQLVMEGYNWSQDRNVVTIFSAPNYCYRCGNQAAIMEIDEHLKYTFLQFDPCPRAGEPMVSRRTPDYFL

SEQ ID NO: 12417 - protein, 112 aa, Bartonella sp. Ap1707yn
NEACLKMLQEIGSIKRIPEFIARAKDKNDPFRLMGFGHRVYKNYDPRAKIMQKTCHEVLKELNIQDDPLLDIAIELERIALSDEYFIEKKLYPNVDFYSGITLKALGFPTEM

SEQ ID NO: 12418 - protein, 112 aa, Bartonella sp. Ac1723yn
NEACLKMLQEIDSVKRIPKFIARAKDKNDPFRLMGFGHRVYKNYDPRAKIMQQTCHEVLKELNIQDDPLLDIAIELEKIALNDEYFVEKKLYPNVDFYSGITLKALGFPTEM

SEQ ID NO: 12419 - protein, 335 aa, Methanopyrus kandleri AV19
MAYKIAVIPGDGIGPEVIEAALHVIEPLIDAEFVEGEAGDECAEKHGDPLPEDTLELCHEADAILFGAAGETAADVIVRLRQELDLYANIRPVRGFPGLRELTGEPYVRDDVDFVIVRENTEGLYSGIEGRFRDTAYTLRIITEEGTRRIAEVACDLAEERGSNTVTCVHKANVMRETCGLFREVCKEVVESRGLEFEEYYVDAAAMFMITEPERFDVVVTPNMFGDILSDEAAALVGGLGLAPSGNVGDRHGLFEPVHGSAPDIAGKGIANPFATILSAVMMLEWLGEDEAAEAVREAVGEAIREGVVTPDLGGDKKTMEVAEFVREAALNRVQ

SEQ ID NO: 12420 - protein, 1165 aa, GIBBERELLA ZEAE PH-1
MDLRNILDATDFYSNFTAALSTFSLDHLDSPTLNLQIIIQEGNSADGDRSGSLETNEEPILQSGHLLLSHKIPLRIGNGSCSIEPASPSLVSREPSPELRIPTNQRQVEIQRRTQSHKSHKRQGGLRLAAVNGDVPVEGDVDNANPRQMQVGQENFPKRVKVKHDGVFHPKESSLGKFVAGVWEQIHSGVILEPHVLTEQVQLTSRSSGNSPSGDLVSTAPSIRPDQTWESFNRSNIFCQRVTQASRTCRSIEVIVQARWVELFDSYVEYLASTNPNLSMTKCRMRAIAEACTDFGWTEKELRNKMGIWRGYKEIKDVLGWVALVFSGMGLYRLCKYRVDFDKDKFSRARTLGKRMEVAADTLHTNWRQLLAIVGESTEPRFAGHPHDWVVQQDGSDPVPLRSTYLAYDSNFTFEHLEESIIDTALWGADDPRWTPPSSAICLSGINVCDLCSEVQSNESAVNACKCFPNLFGVPRLPIAVQVFCTSNGRNNGLQALVAFERGTAIGEFVGLITKDIEEQDVMDSQAGGTRYQIWQGKQGNFTRFANHSCKPNAQFEKFVWLGTQHIVMNNTADIPLLFRFNMINRKIPLASYLFTRLKQAGTRRIYGVPGDFTLRALDHVPRSGIQFVGCCNELNAGYAADGYARAQRHRLQSGLGALITTYGVGELSAANAVAGSYAEHLPVVHIVGTPSQKARQVSTTSVGGRSPHLHIHHTLADSRIGVFREIAEKFTVAQLDLSGVDAEDVPTKVDEVLAKALYHSRPVYVELPSDAVETVVSSTLLERPIEERHTINDESSHLETREMADSLLQRLYAAKRPLILVDRGDGIETIRPDINEFVQKSGIPTLSLPSGASMVNNSLPNYFGVYSGSIGIVDLTSAVKSADLVLAFGCQFSDTQTLGWGVVPERNSMIMIGRNNIEDHQTGTGEILRMVTANLDKRSLAEQDTSSWGNFRHLPSQTVEPASPINQDEFYIHLNKYLKDDDNILLGNATPIIGGRDFVLPPSSQLIASGMWFSIGHMLPAAMGVSQAKADQGSSGRTILLDGDGSFQMTAQELSTIIHKRVNMVVFIINNSGYTYERYIHGMDEEYNDVAPWNYSLGPNLFGQAPDGYPIQSCRVHTWKELDSVLNSEGFSTGKGLTLVDIVIDKYDISERAKALFELVNKQL

SEQ ID NO: 12421 - protein, 386 aa, Vitis vinifera
MESTLAFNSGSNSMNQSFSSSAEFNSPVPETIPKSEEDTFVFATLLTSASVLPMALKSALELDLLEIIAKAGPGAFVSTSEIAAKITKRNPKAPVMLDRILRLLATYDVVKCSLRDSPDGGVERLYGLGPVCKYFTTNEDGVSVAPLLLMNQDKVPMQSKRYHLKDAVLDGGIPFNKAYGMTDFEYHGTEPRFNKVFNNGVSGHPTITMKKILEAYKGFEGLTSIVDVGGGTGATLNMIISKYPTIKGINFDLPHVIDDAPSYPGVEHVGGDMFVSVPKGDAIFMKWMCYEWDDAHCLKFLENCYQALPDNGKVIVAECILPVVPDTSLATKSAVHIDVIMLAYNTGGKARTEKEFEALAKGAGFQGFKVVCCAFNSWIMEFCKTA

SEQ ID NO: 12422 - protein, 292 aa, Lolium multiflorum
IELGLLEILVAAGGKSLTPTEVAAKLPSAANPEAPDMVDRMLRLLASYNVVSCLVEEGKDGRLSRSYGAAPVCKFLTPNEDGVSMAALALMNQDKVLMESWYYLKDAVLDGGIPFNKAYGMSAFEYHGTDPRFNRVFNEGMKNHSIIITKKLLELYHGFQGLGTLVDVGGGVGATVAAITAHYPAIKGVNFDLPHVISEAPPFPGVTHVGGDMFKEVLSGDAILMKWILHDWSDQHCATLLKNCYDALPAHGKVVLVECILPVNPEAKPSSQGVFHVDMIMLAHNPGGSQRY

SEQ ID NO: 12423 - protein, 292 aa, Schedonorus arundinaceus
IELGLLEILVAAGGKSLTPTEVAAKLPSAANPEAPDMVDRILRLLASYDVVTCLVEEGKDGRLSRSYGAAPVCKFLTPNEDGVSMAALALMNQDKVLMESWYYLKDAVLDGGIPFNKAYGMSAFEYHGTDPRFNRVFNEGMKNHSIIITKKLLELYHGFEGLGSLVDVGGGVGATVAAIAAHYPTIKGVNFDLPHVISEAPQFPGVTHVGGDMFKEVPSGDAILMKWILHDWSDQHCATLLKNCYDALPAHGKVVLVKCILPVNPEANPSSQGVFHVDMIMLAHNPGGNQRY

SEQ ID NO: 12424 - protein, 173 aa, Glycine max
  unsure (1)..(173): unsure at all Xaa locations
MCGILAVLGCSDSSQAKRVRVLELSRRLKHRGPDWSGLHQYGDNYLAHQRLAIVDPASGDQPLFNEDKTVVVTVNGEIYNHEELRKQLPNHTFRTGSDCDVIAHLYEEHGENFMDMLDGIFSFVLLDTRDNSFIVARDAIGVTSLYXGXWGLECSVVNSSEXKRFDDDCDTLE

SEQ ID NO: 12425 - protein, 514 aa, Glycine max
  unsure (1)..(514): unsure at all Xaa locations
MSKTTTSSEQTARNRLATLAAHLLPSDATSAAAILHPHRLSAPTGDLPPANLKGTLTVVDERTGKKYQIEVTPDGTVRASDFKKISSGKNDKGLKLYDPGYLNTAPVISRISYIDGDAGILRYRGYPIEDLAEKSTFTEVSYLIMYGNLPSESQLAEWEFAISQHSAVPQGVLDMIQSMPHDAHPMGVLVNAMSALSVFHPDANPALRGLDIYDSKQIRDKQITRVIGKITTIAAAVYLRMAGRPPVLPSNHLSYTENFLYMLDSFGNRSYKPNPRLTRALDIIFILHAEHEMNCSTSAVRHLASSGVDVYTAIAGAVGALYGPLHGGANEAVLKMLSEIGTVQNIPEFIEGVKARKRKLSGFGHRVYKNYDPRAKVLRKLAEEVFSIVGRDPLIEVXAVALEKIALSDEYFIKRKLYPNVDFYSGLIYRAMGFQPEFFTVLFAIPRMAGYLAHWRESLDDPDTKIMRPQQVYVGEWLRHYAPINQRTASSNTDKLGQLAVSNASKRRLAGSGA

SEQ ID NO: 12426 - protein, 448 aa, Bacillus subtilis subsp. subtilis str. 168
MTHDLIEKSKKHLWLPFTQMKDYDENPLIIESGTGIKVKDINGKEYYDGFSSVWLNVHGHRKKELDDAIKKQLGKIAHSTLLGMTNVPATQLAETLIDISPKKLTRVFYSDSGAEAMEIALKMAFQYWKNIGKPEKQKFIAMKNGYHGDTIGAVSVGSIELFHHVYGPLMFESYKAPIPYVYRSESGDPDECRDQCLRELAQLLEEHHEEIAALSIESMVQGASGMIVMPEGYLAGVRELCTTYDVLMIVDEVATGFGRTGKMFACEHENVQPDLMAAGKGITGGYLPIAVTFATEDIYKAFYDDYENLKTFFHGHSYTGNQLGCAVALENLALFESENIVEQVAEKSKKLHFLLQDLHALPHVGDIRQLGFMCGAELVRSKETKEPYPADRRIGYKVSLKMRELGMLTRPLGDVIAFLPPLASTAEELSEMVAIMKQAIHEVTSLED

SEQ ID NO: 12427 - protein, 196 aa, Glycine max
MAFAGTTQKCMACDKTVYLVDKLTADNRVYHKACFRCHHCKGTLKLSNYNSFEGVLYCRPHFDQLFKRTGSLDKSFEGTPKIAKPEKTGEEKPAATKVSSMFGGTRDKCAGCQKTVYPTEKVTVNGTPYHKSCFKCTHGGCVISPSNYIAHEGKLYCKHHHVQLIKEKGNLSQLEGDHEKSAEQEKINGEVVAAET

SEQ ID NO: 12428 - protein, 301 aa, Zea mays
LLASFPPLYPSNGWHVSATPLGVCFRSTRPTFYRIYKSKSTEGFQSVPYVVALFSAMLWIFYALIKSNETFLITINAAGCVIETIYVVMYFVYAPKKAKLFTAKIMVLLNGGVFGVILLLTLLLFKGSKRVVLLGWICVGFSVSVFVAPLSIMRRVIQTKSVEYMPFSLSLSLTLSAVVWFLYGLLIKDKYVALPNILGFTFGVVQMVLYVLYMNKTPVAATAEGKDAGKLSSAADEHVLVNIAKLSPALPERSSGVHPVTQMAGVPVRSCAAEATAPAMLPNRDVVDVFVSRHSPAVHVA

SEQ ID NO: 12429 - protein, 191 aa, Yarrowia lipolytica
MQTIKCVVVGDGAVGKTCLLISYTTNKFPSEYVPTVFDNYAVTVMIGDEPYTLGLFDTAGQEDYDRLRPLCYPQTDVFLVCFSVTSPASFENVKEKWFPEVHHHCPGVPCLIVGTQVDPRSDRMILDKLSRHKLRPMTTEQGYQLARELGAVKYVECSALTQKGLKDVFDEAIVAALEPPVVKKNKKCIVL

SEQ ID NO: 12430 - protein, 112 aa, Bartonella sp. Ac1727yn
NEACLKMLQEIGSIKRIPEFIARAKDKNDPFRLMGFGHRVYKNYDPRAKIMQKTCHEVLKELNIKDDPLLDIAMELEKIALNDEYFIEKKLYPNVDFYSGITLKALGFPTEM

SEQ ID NO: 12431 - protein, 187 aa, Griffithsia japonica
HEARSLRYASSAIRATASPRSLSTSASTSPQFTVTLFPGHGVGPEISVAVQNIFNAADVPIVWDEHHIDVDNAKPGQDLISADALDSLRRNRFGLKGPMATPIGKGYRSLNLTLRKALGLYANVRPCVSIPGVQTPYDDVDVVTVRENTEGEYSGLEHVVYPGVVESLKVITPERVNARVQVPFSII

SEQ ID NO: 12432 - protein, 101 aa, Zea mays
  unsure (1)..(101): unsure at all Xaa locations
RRLSVRDLKEKFAKGLSGACKLAEDGTLEKTRXLYRQVLLKKLINGLNTLKGRVAGRNRYNAVEAILLREALTVQLTQQEGELMYEKAEVKKWVIFLKQAT

SEQ ID NO: 12433 - protein, 182 aa, Triticum aestivum
MSDAPASPPGGGGGGGGGGSDDGGGGGGFGGVREQDRFLPIANISRIMKKAIPANGKIAKDAKETVQECVSEFISFITSEASDPGRREKRKTINGDDLLWAMATLGFEEYIEPLKVYLQKHRETEGDSKLPGKSGDVSVKKDALGPHGGASGTSAQGMGQQVAYNPGMVYMQPQYHNGDISN

SEQ ID NO: 12434 - protein, 347 aa, Methanocaldococcus jannaschii DSM 2661
MMKVCVIEGDGIGKEVIPEAIKILNELGEFEIIKGEAGLECLKKYGNALPEDTIEKAKEADIILFGAITSPKPGEVQNYKSPIITLRKMFHLYANVRPINNFGIGQLIGKIADYEFLNAKNIDIVIIRENTEDLYVGRERLENDTAIAERVITRKGSERIIRFAFEYAIKNNRKKVSCIHKANVLRITDGLFLEVFNEIKKHYNIEADDYLVDSTAMNLIKHPEKFDVIVTTNMFGDILSDEASALIGGLGLAPSANIGDDKALFEPVHGSAPDIAGKGIANPMASILSIAMLFDYIGEKEKGDLIREAVKYCLINKKVTPDLGGDLKTKDVGDEILNYIRKKLKGY

SEQ ID NO: 12435 - protein, 112 aa, Bartonella sp. Ap1699yn
NEACLKMLQEIGSVERIPEFIARAKDKNDPFRLMGFGHRVYKNYDPRAKIMQKTCHEVLKELNIQDDPLLDIAMELEKIALNDEYFVEKKLYPNVDFYSGITLKALGFPTEM

SEQ ID NO: 12436 - protein, 371 aa, Magnaporthe grisea 70-15
MAHLPNPSLQVTADHQLKQVEASILSPGPGEVLLHVKCTGVCGSDVHFWKTGAIGTLVVEGDCILGHEAAGIVLSTGQDVTTLKPGDRVAIEPGVPCNKCFLCSEGRYNLCQEVQFAGVWPYHGTLQRYKVHPARWLHKLPDSLSYAEGALLEPLSVVLHGIRVAGLSLGRGAVICGAGPIGLIALAAARASGAHPIVITDVEPRRLEFAREFVPSCQTYRVDPTQSPEENARGIRALFGLKGGAVPDPDEYSAPPVVLECTGVESSVCTAAFTARRGGIVVVIGVGKSTMNNLPFMHLSLAEIDLRFINRYRDTWPAGIACLESGILPDLKKLVTHVFPLEKAIEGLTLASDPRNGSIKVQIVDEVDISP

SEQ ID NO: 12437 - protein, 112 aa, Bartonella sp. Ap1714yn
NEACLKMLQEIGSIKRIPEFIARAKDKNDPFRLMGFGHRVYKNYDPRAKIMQKTCHEVLKELNIQDDPLLDIAIELEKIALSDEYFIEKKLYPNVDFYSGITLKALGFPTEM

SEQ ID NO: 12438 - protein, 195 aa, GIBBERELLA ZEAE PH-1
MAVVATIKCVVVGDGAVGKTCLLISYTTNKFPSEYVPTVFDNYAVTVMIGDEPYTLGLFDTAGQEDYDRLRPLSYPQTDVFLVCFSVTSPASFENVREKWFPEVRHHCPGVPCLIVGTQVDLRDDPSVREKLSKQKMQPVRREDGERMAKDLGAVKYVECSALTQYKLKDVFDEAIVAALEPPAPKKKSHKCLVL

SEQ ID NO: 12439 - protein, 457 aa, Mesorhizobium sp. BNC1
MTDRSNELNAWDRDHFFHPSTHMGTHARGESPNRVVAGGEGVYITDVNGRTSLDAFAGLYCVNVGYGRQKIADAIAEQARNLAYYHAYVGHGTDASIRLAKMIIDRAPQGMSRVYFGLSGSDANETNIKLIWYYNNVLGRPEKKKIISRWRGYHGSGIMTGSLTGLDLFHNAFDLPRAPILHTEAPYYFRRPDRSMSEEQFSQYCADKLEEMILAEGPDTVAAFIGEPILGTGGIVPPPAGYWEKIQAVLKKYDVLLIADEVVTGFGRLGTMFGSDHYGIKPDLITIAKGLTSAYAPLSGVIVSDKVWQVLVQGSDKLGALGHGWTYSAHPLCAAAGVANLELIDEMNLVENAGTVGAYFRAELANAVGSHPNVGEVRGDGMLAAVEFVADRDDRVFFDASKKIGPQIAAALAERGVIGRAMPQGDILGFAPPLCLTKEEADKVIAATASAVDSVLG

SEQ ID NO: 12440 - protein, 497 aa, Mesorhizobium sp. BNC1
MNAATAKIDLSAKLDLLHDKSLLRELAYVDGRWVTGHEPVNFEVRDPATGAVLAYVASLNAAQVDSAIDAAARAFLSWKRLLPQERAATLRAWYELIVAAKEDLALLMTLEQGKPLAESRGEIDYAASFVEWYAEEAKRLNVESVTSHLPGAEMMVRREPLGVVGVVTPWNFPSAMLTRKAAAALAAGCTIVAHPSSETPLSALALAELGERAGLPAGVLNVVTGDAATIVGRMCGDSRIRAMSFTGSTEIGRLIAAQCAPTMKRLVMELGGHAPLIVFEDAPLDKAVDIAIGAKFATSGQDCLAANRIYVQRGIYGAFCEAFAARIATLKVSDGLDETGDIGPLMHERAIAKVEEQVTDALGRGARCLIGGERHPAGRLFYQPTLLADVPDAALIMREETFGPVAAAVPFDTEDEVVRRANNTEYGLVAYVVTENGARQLRMGRALDYGMVAINRVKITGAPIPFGGVKQSGIGREGARHGLEAFTDLKYLCLDAA

SEQ ID NO: 12441 - protein, 452 aa, Glycine max
  unsure (1)..(452): unsure at all Xaa locations
VGEACQKYGSIFMHPQGLYISLKEKGKIREVLRNWPEKNIQXVIVVTDGERILGLGDLGCQGMGIPVGKLSLYTALGGVRPSACLPITIDVGTNNEKLLNDELYIGLKQRRATGQEYAELMHEFMTAVKQTYGAKGPDLDEEXLGNRNAFTRLKNYSSTHVCFKDDIQXGTASVVLAGLVASLKLVGGNLADHRFLFLGAGEAGTGIAELIALETSKQTNAPLEEVRKNIWLVDSKGLIVSSRKDSLQHFKKPWAHEHEPVKNLLDAVNKIKPTVLIGTSGQGRTFTKEVIEAMASINKRPIILSLSNPTSQSECTAEEAYKWSQGRAIFASGSPFPPVEYEGKVFVPGQANNAYIFPGFGLGLIMSGTIRVHDDLLLAASEALAAQVSQENFDKGLIYPPFTNIRKISAHIAANVAAKAYELGLATRLPQPKDLVKFAESCMYTPAYRSYR

SEQ ID NO: 12442 - protein, 226 aa, Methanocaldococcus jannaschii DSM 2661
MSNEDLKLKVAKEAVKLVKDGMVIGLGTGSTAALFIRELGNRIREEELTVFGIPTSFEAKMLAMQYEIPLVTLDEYDVDIAFDGADEVEETTLFLIKGGGGCHTQEKIVDYNANEFVVLVDESKLVKKLGEKFPIPVEVIPSAYRVVIRALSEMGGEAVIRLGDRKRGPVITDNGNMIIDVFMNIDDAIELEKEINNIPGVVENGIFTKVDKVLVGTKKGVKTLKK

SEQ ID NO: 12443 - protein, 540 aa, Glycine max
MATRRLSLLLSRSLSSTSFQAASLLHSLGRNSGKWGNFNRFSTAAAVEDLITPQVPITYTKHLINGQFVDAASGKTFPTYDPRTGEVIAQVAEGDAEDINRAVSAARKAFDEGPWPKLTAYERCKIILRFADLVEKHGDELAALETWNNGKPYEQSATAELPTFVRLFRYYAGWADKIHGLTVPADGNYHVETLHEPIGVAGQIIPWNFPLLMFAWKVGPALACGNTVILKTAEQTPLTALYVAKLFHEAGLPPGVLNVVSGYGPTAGAALASHMDVDKLAFTGSTETGKVVLGLAAQSNLKPVTLELGGKSPFIVCEDADVDQAVELAHFALFFNQGQCCCAGSRTFVHEHIYDEFLEKAKARALKRVVGDPFKKGVEQGPQIDVEQFQKVLRYIKSGIESKATLECGGDQIGSKGFFVQPTVFSNVQDDMLIAKDEIFGPVQTILKFKDIDEVIRRSNATHYGLAAGVFTKNVHTANTLMRALRVGTVWINCFDVFDAAIPFGGYKMSGIGREKGIYSLNNYLQVKAVVSPVKKPAWL

SEQ ID NO: 12444 - protein, 1566 aa, Ustilago maydis
MSAATPTSPGFPLTMGTGVMAAHFAAPSSNAGSPRSRPTTPLSAGLTPSGPTYDDLGRWDDADVASWLNAARLGHYASIFAEHDIRGSVILDVDQAALKEMGITMVKDRVRISAAIKLLNKRCADSAVARRPSVVSISPLLPLASHPLYAHEGEIEYLQHDHTADPSADGSGSNFGLNSMGMRRGQMRPPPLTLKQSTSRGMPGYASPAGSINQSQGFGLSAARGLTPGAARGSVWNTASSSSATSKPGTPDGALHRKVNSIGGVAAPLAVGASSSLSSSRHPYGHAVHSNRPSTATGASGYSNVPASQSLRSNHTSSSPTATSFGSNINAASARPSTATGAQSYTTNVPGTSSARDGYSPLTPISESNSLGNTPTTPSGIQQQQQSAGYAVGRGPFASSQRYAASSVPSQQQPSSGHTLRHVDSGEGYNLAGYQNPNPPTLEDLKRRTIKFISEEDNTTRIVNVSDCRDAYDVMARVLKKFGKPPSGNSYTPTADQGPTGDELGATETWGIFATSADGQNTKALSDNELLAICHAPQPHDPLRERGLTLRRIPNHLPGEDARKVPVRSGRNKLEAFFGERMPVAQMQPAGPGSGVNADEEDAGSVTISGKKMKRASTVSIMSGLGVGPFSSSSHNTGAGHTHGSTRAEGKLLSKKESKHMSPPPVTSKPSKIRNFFGQRPPSELINTNLADFFPSTDSKALQRTARRSIYGRASASTRSKRNSTWSFVADPDAPPLPNKGSMDGHPTPLERSSISIRERGTTPVIQIGYDSRSEDDHQSNARRTSSGTHSHLHPSLTGPPTLPPVVSRDSLDEWSRDLKAVGSPVTEENAMFQSSRHGHASGSQQHHAAMKHYPSHASGYADRPSISRRASGESARSRRSLASQVRHGLSAARERNADTASLLTVDEITQEVENRRESISLAGAGGGWVVDEDGVPIPIPGSSSPFSSSAAASTRPSSGISSSYVHNGHLEHDDSEGHSDEEANQSSDLEEATRTRKARGVPSKAASIRTVASKRASSVLQAPGDESDRHLGDPMAVARSTTSRASSVSELRRSVHDHGDPSDGESGSDFTDSDLDSDGSETDEDEQANDVYLPSAKPAPIKWHKGALIGAGSFGNVFLGMNAKTGLLMAVKQVELPSGDSHLDQRKKGMLEALEREIKLLKSLEHENIVQYLDSFADDSHLNIFLEYVPGGSIVALLRNYGAFEEPLVRNFVRQILNGLSFLHNRGIMHRDIKGANILVDNKGGIKISDFGISKKVESDLVLATNKGGAGGGGAGGAAHRPSLQGSVFWMAPEVVKQTSYTIKADIWSLGCLVVEMISGTHPWAELNQMQALFQIGMGRKPSLPDEISNECRDFLEKTFELDYNNRPSADELLNHAFMGTEMTFPPSSGADGSGGGDDDAGGSGDAGDGDASTMGMTNDAETGTTRETRETKDGKRPTRSKSTRRLEREKRHKEAAAAAAAATALDTGTPNTPTSHTAAAAAAAAAASASASASASPAVASTSPAPGDAETGSPTNGKSAVPPAGSTGGTPESILTVSIATARGNSTSTALSAADAAFSEEADS

SEQ ID NO: 12445 - protein, 462 aa, Arabidopsis thaliana
MWRRSNLPGNPDSDQSISEEEEENDISPKENAKEQERGLLLQTKLEKLIGCGELNYARETGDVTLEATLRKISSSLEDVVEVPDSPEESYISSSRRTGLACISAQENGSDDEITHDEQVATWSAISKETKSLIHLNGVASVASSHLSGFRAKKSSNGLKDHGRPKFSFNSHTHGETSSKISDMAEIFEPDVEDQAIEEDPIIECPNSFDERSENRQGVSVAESREVLHECTKDAVPKLQEIPLDKIRLIKRSSELDSRHEAKSRKFTHKGNSSNFQDSDTDDELPGPMDSGSSSDDEPSYQSSVPNISNQKKQFVGDRFDEAIKASSLSKEGLLFGSPKLSGGSSLYGKLQQIMKQEKETEMEIMRKLQSGIGEAVMSRHLEGKLVVCKCSVIDLSGDSLLLKNTQALAAKETETTIIFSPKVCADVDIEIGNFIRVYAPWKELEVQKTNDVIILSSYFSSL

SEQ ID NO: 12446 - protein, 129 aa, Chlamydomonas reinhardtii
MGGCLEEQYLEVLAALHSDAVAAATLCRVFSSRERTEEVAFGLNTVFMLFSAALVFIMHGGFAMLEAGAIRSKNAMNILLQTVLDGAASAVMWYLVGFGFAYGIGDNPNGFIGDALFGLSRYSSHNTGT

SEQ ID NO: 12447 - protein, 305 aa, Hordeum vulgare subsp. vulgare
MKILIILTILAMATTFATSEMQVNPSVQVQPTQQQPYPESQQPFISQSQQQFPQPQQPFPQQPQQPFPQSQQQCLQQPQHQFPQPTQQFPQRPLLPFTHPFLTFPDQLLPQPPHQSFPQPPQSYPQPPLQPFPQPPQQKYPEQPQQPFPWQQPTIQLYLQQQLNPCKEFLLQQCRPVSLLSYIWSKIVQQSSCRVMQQQCCLQLAQIPEQYKCTAIDSIVHAIFMQQGQRQGVQIVQQQPQPQQVGQCVLVQGQGVVQPQQLAQMEAIRTLVLQSVPSMCNFNVPPNCSTIKAPFVGVVTQVGGQ

SEQ ID NO: 12448 - protein, 132 aa, Zea mays
  unsure (1)..(132): unsure at all Xaa locations
MLTNPLPLAAVTVSRMMAPLKHVRGLEFAADVGYVDFLSRVNRVEEEARRNGSWDAPHPWLNLFVSARDIADFDRAVIKGMLADGIDGPMLVYPMLKSKWDPNTSVALXGEVFYLVALLRFCRSGGPAVDEL

SEQ ID NO: 12449 - protein, 134 aa, Brassica napus
  unsure (1)..(134): unsure at all Xaa locations
MGERVKGTVKWFNVTKGFGFISPDDGGEDLFVHQSSIKSDGYRSLNENDAVEFEIITGDDGRTKANDVTAPGGGALSGGSRPVEGGGDRGGXGGYGGGGGGYGGGGGGYGGGGGGYGGGGGGYGGGGYGGGGGG

SEQ ID NO: 12450 - protein, 194 aa, Xylella fastidiosa 9a5c
MNMLNVLRFPVLALALALAFVSSGVLADAGSLLDLDYRPLAGKETVNLQRLYGGKVLLVVNTASKCGFTPQYEGLEALHQKLSPLGFAVLGFPSNDFKGQEPGDEQQIQKFCTLTYGVKFPMFQKVHVKGDEVTPLYQRLTQTTGVAPGWNFHKYLIARDGHVVAQFDSRTRPDDPILLEAIKRELAKPVQVAH

SEQ ID NO: 12451 - protein, 322 aa, Xanthomonas campestris pv. campestris str. ATCC 33913
MEFDPDVVRLFVQLQQAGQPPMEALPLQEARAMMRGMGVQLGFPRLPMAQVTDLQADTAAGTVPLRLYRPPGLNDTPAPTCLFVHGGGGVVGDLDSHDDVCRQLAARTPCQVLAVDYRLAPKHPAPAGVEDVIATLHWLAEHADAVGADPQRLAICGDSIGGGMAAVAAITAQQRGIALRCQLLLYPLTDARPDTGVHPSRGRNAEIPPLTRSAVQFFNRLLLPDMRLADHWHISVLLAPDVAGVAPALVVLADRDILHDEGLQYAERLRTAGVEVTQRTCVGMIHGFITMGGVIRAAEETIELAALMLRQRLLPVQPRFAA

SEQ ID NO: 12452 - protein, 451 aa, Methanococcoides burtonii DSM 6242
MTSINPANGTVNGEFEFHSPDEVDLILKRSSESFQYWSSLKGVERAVYIENVAKVLRSDKQELAETITMEMGKPIRQALAEVEKCASMFDHFATNICSLLEPDVVKESPSAFISYEPMGAVLAIKPWNFPLWQVLSAASHILAGGNTMVLKHSGYVPMCALNIESVFEKAGFPEGVFQTVLVDGPTASSLISRPEIAAVSFTGGLSAGQNVAEVAGRNMKKCVLELGGSDPFIVLEDADIEKAAKAGVAGRFLNTGQTCISSKRFIIESSVVDEFTSAFVENTRKLKIGDPLDADTDLGPLVRDKQVSLLEHQIYNAISMGAKVELGGGKVEGDGYYFSPVVLSNVSLYMQVMKEETFGPVAPIISVETESEALDVANATEFGLGASIWSGDKDKASLLASQVQSGVVGVNGFFKPEADLPFGGVKKSGIGRELSRFGFYEFMNIRSTVLF

SEQ ID NO: 12453 - protein, 112 aa, Bartonella sp. Em1712yn
NEACLKMLQEIGSVERIPEFIARAKDKNDPFRLMGFGHRVYKNYDPRAKIMQKTCHEVLKELNIQDDPLLDIAIELEKIALNDEYFVEKKLYPNVDFYSGITLKALGFPTEM

SEQ ID NO: 12454 - protein, 166 aa, Zea mays
  unsure (1)..(166): unsure at all Xaa locations
GRVQEHQEMLHCPSKAMDIENEIQVLCDQLAKKSSDSLRLLKELELHRSYXENDMPLYELKGLETLGSTLHIVVHDCASVDFWNSSIQWFRIQPEGSKKEIIXGTTKPAYAPEPHDVGRYTQAEVKSGGQTSITKIAGSVDPVSXAAGLVHYVEALVRRRETGYNV

SEQ ID NO: 12455 - protein, 362 aa, Triticum aestivum
MGSTAVEKVAVATGDEEACMYAVKLAAASILPMTLKNAIELGMLEILVGAGGKMLSPSEVAAQLPSKANPEAPVMVDRMLRLLASNNVVSCEVEEGKDGLLARRYGPAPVCKWLTPNEDGASMAGLLLMTHDKVTMESWYYLKDVALEGGQPFHRAHGMTAYEYNSTDPRANCLFNEAMLNHSTIITKKLLEFYRGFDNVETLVDVAGGVGATAHAITSKYPHIKGVNFDLPHVISEAPPYPGVQHIAGDMFKKVPSGDAILLKWILHNWTDDYCMTLLRNCYDALPMNGKVVIVEGILPVKPDAMPSTQTMFQVDMMMLLHTAGGKERELSEFEELAKGAGFSTVKTSYIYSTAWVIEFVK

SEQ ID NO: 12456 - protein, 226 aa, Triticum aestivum
  unsure (1)..(226): unsure at all Xaa locations
MKTLLILTILAMATTIATANMQVDPSSRVQWPQEQPPPQSQQPFSQQPQQIFPQPQQTFPHQPQQAFLQPQQTFPRRPQQQFPQPQQPQQPFPQPQQPQLPFPQQPQQPFPQPQQPQQPFXQSQQPQQPQQPFPQPQQQFPQPQQPQQSFPQQQQQLPQPQQPQQSFPQQQRSFIQPSLQQQLNPCKNILLQQCKPASLVSSLWSIIWPQSDCQVMRQQCCQQLAQ

SEQ ID NO: 12457 - protein, 585 aa, Triticum aestivum
  unsure (1)..(585): unsure at all Xaa locations
YQTRRPSNRFPLFSCSARLQSTLLASHRPIRWTAPPARGRLAVLSSHLLAAGADPAAALGRSPASAAAPGARAGVLAVVDSRTGKRYEVKVSEDGTVRATDFKKITTGKDDKGLKTYDPGYLNTAPVRSSICYIDGDEGILRYRGYPIEEVAESSSFVEVAYLLMYGNLPTQSQLAGWEFAISQHSAVPQGLLDIIQSMPHDAHPMGVLASAMSTLSVFHPDANPALRGQDLYNSKQVRDKQIVRVLGKAPAIAAAAYLRLAGRPAVLPSNNLSYSENFLYMLDSLGNKEYKPNPRLARVLDILFILHAEHEMNCSTAAVRHLASSGVDVFTALSGAVGALYGPLHGGANEAVLKMLNEIGAVENIPDFIEGVKNRKRKMSGFGHRVYKNYDPRAKVIRKLAEEVFSIVGRDPLIEVAVALEKAALSDDYFIKRKLYPNVDFYSGLIYRAMGFPTEFFPVLFAIPRMAGWLAHWKESLDDPDNKIMRPQQVYTGVWXLRHYTPVRERVASNQGEELGQIAASNATRRRRAGFFPVEQQQARMHGAASSPRNKPGCCRCPSQRRSGSSPGAVILLVSPRHLAVAMQ

SEQ ID NO: 12458 - protein, 292 aa, Oryza sativa (japonica cultivar-group)
MEHLERRGLAQGAYDGADPLDIGGFGDATGVDDAAEDVGDDLPLLDEVPAQDDLLRVVLIVADRGGGGGGRGSGISRGVAIRRGRGGHRDGDARCRLLPPELISLLSRAPTTETSSPPSAAMQQRRPASGRPSGTDGSDFSYRMVVDSRYQRVADGKSRLGRLILVQALHQVAGGALLLLALSKGAEMNKFAVMSVAAGLLAIVLGEIGRRRTMAVLLRMYTSLSSIAVAFSVACIIRSELFFKITKQNTESITSHELLEVVRVALGVLLQLVVIATTTRLLQNMSPPRRAS

SEQ ID NO: 12459 - protein, 311 aa, Magnaporthe grisea 70-15
MNSAASSHQPDASGEAPKQLNYLPYLKLNDGNQIPMLSYGLGTAQCRRGGDVDPKLVELTKIALKKGYNHLDGAEVYGNEEELGQAVKESGLPRESLFITTKTFCKPGVTTQESLDASLKRLQLDYVDLFLIHSPFWAESPEELQAKWAEMEALREAGKAKSIGVSNFLQEHLETILKTAKVPPAINQIEYHPYLQHGDLLDYHRKQNIATSAYGPLTAITNAKGGPVDGKYHELARKYGVTPGEIALRWCIDQGVVAITTSAKEDRLEALQKRIPSFKLTPKEVQEISELGNQKHHRGFWNNKFAADDRR

SEQ ID NO: 12460 - protein, 111 aa, Triticum aestivum
MSLCTIARRLCLSKPSSGRCLSVVWGHLYSTEVASQKVVDLADRIAALPPEEIKQIAPALLFRLNREPPQVISGQGFSFGAQGGSGAAAGKADEKKAEKTVFDVKLEKFDA

SEQ ID NO: 12461 - protein, 142 aa, Glycine max
  unsure (1)..(142): unsure at all Xaa locations
AVVNRYLAESESARQWGSQLHTFCIGLKGSPDLKAAKEVADYLGTRHHELYFTVQEGIDALEEVIYHIETYDVTTIRASTAMFLMSRKIKALGVKMVRGGEGSDEIFGGYLYFHKAHNXXEFHEETCRKIKAHHLYDCLRAQ

SEQ ID NO: 12462 - protein, 210 aa, Arabidopsis thaliana
MLTAAGDDELDPVVGPESATEAATPRVLTIISHVMEKLVARNEWLAKQTKGFGKSLEAFHGVRAPSISIAKYLERIYKYTKCSPACFVVGYVYIDRLAHKHPGSLVVSLNVHRLLVTCVMIAAKILDDVHYNNEFYARVGGVSNADLNKMELELLFLLDFRVTVSFRVFESYCFHLEKEMQLNDAVSSLKDIQPMQESLSPASTLSSLYV

SEQ ID NO: 12463 - protein, 170 aa, Campylobacter jejuni
MKNNPYIIWLTGLAGSGKTTIGQALYEKLKLKYKNLIYLDGDELREILGHYAYDKQGRIDMALKRAKFAKFLNDQGMIVIVTTISMFNEIYDYNRKQLKNYYEIYIECDMHELMQRDQKGLYTKALNKEIDNVVGVDIEFDKPEADLVIDNSCRNNLEEKVELIIKKLGL

SEQ ID NO: 12464 - protein, 356 aa, Glycine max
MVNNMIVQIHHGRLSENDSRRYFQQLIDGVDYCHSKGVYHRDLKPENLLLDSLGNIKISDFGLSAFPEQGVSILRTTCGTPNYVAPEVLSHKGYNGAVADVWSCGVILYVLLAGYLPFDELDLTTLYSKIERAEFSCPPWFPVGAKMLIHRILDPNPETRITIEQIRNDEWFQRSYVPVSLLEYEDVNLDDVNAAFDDAEEPRADQQCDNDDMGPLMLNAFDLIILSQGLNLATIFDRGQDSVKYQTRFISQKPAKVVLSSMEVVAQSMGFKTHIRNYKMRVEGVSANKTSYFSVILEIFEVAPTFYMVDIQKAAGDTGEYLKFYKNFCSNLEDIIWKPPHEASKSRISKTKSKRR

SEQ ID NO: 12465 - protein, 495 aa, Burkholderia fungorum LB400
MTGHLPKLSMYIGGEWVEPASGEYFETVDPFTAKPWALIPRGNAEDADRAIRAADKAFRDGPWRAMHPSERGLVLQRFGQLIGQHADELAGIEVRDNGRLLAEMRHQIRGIPKWYYYYGGLADKIEGAVHPVEQPALSFTRHEPLGVCVGIVPWNAPLLLLSLKAAPALAAGNTIVLKPAEFTSASALKLMELVEQAGFPPGVVNVVTGFGKEVGEPLVAHPLTRHLGFTGSTATGSHLYALAAKDVKRASLELGGKSANLVFNDADLNNAVRGVVGGIFGAVGQTCIAGSRLLVQRRIHDEFVDKLAAFTKTARIGDPRKPETQIGPIANRMQYNKILGYIDIAREEGAELVMGGARPDIAECGEGFFIEPTIYTGIRNDMRIAREEVFGPVLATIPFDDPEEAIAIANDSDFGLGAGVWTSDMRLALRMSERLEAGSVWINTYRDISYTTPFGGYKKSGIGRENGIEGIREYLQTKAVWISTAEEIENPFVIG

SEQ ID NO: 12466 - protein, 117 aa, Beta vulgaris subsp. vulgaris
MASSAFVKFTCALVMCMMVAAPLAEAITCGLVASKLAPCIGYLQGAPGPSAACCGGIKSLNSAAASPADRKTACTCLKSAATSIKGINYGKAASLPRQCGVSVPYAISPNTNCNAIH

SEQ ID NO: 12467 - protein, 243 aa, Triticum aestivum
MATDRVKASVLHGEKDLRLEERELPKPSSNEVQVAVQSTGLCGSDLHYYNHFRNGDIIVREPLTLGHESAGTVVAVGSEVTHLKPGDHVALEVGLPCETCELCDEGRYNICRGMKFRSSAKANPHAQGTLQERINHPAKWCHKMPEHVTLDLGALVEPLSVAMHARDRASLPKGSTVLVLGAGAVGLLAAAVAKADQAKTVIIADILKDRLDFATSNGFADASVVGPMEPQLSRTAGFRSKVA

SEQ ID NO: 12468 - protein, 386 aa, Triticum aestivum
  unsure (1)..(386): unsure at all Xaa locations
MEGGGARNVSAAAAQTKESADDGSCKPLPPCCVKAQAAVAESEAKCHATVVSGWFTGTRSRSGQTXSKAQYFNNPMWPGEAHSLKVEKILYQGKSPYQEVLVFESSTYGNVLVLDGIVQLTDKDECAYQEMVTHLALCSIPSPKNVLVVGGGDGGVLREIAKHDSVESIDICEIDQLVIDVCKDFFPRLYVGYKDPRVKLHVGDAVEFLRNSPEGKYDAIIVDSSDPIGPAQELVEKPFFQTIARALKPGGVLSNLAESMWLHTHLIQDMLSICREVFKGGVHYAWASVPTYPSGVIGFLLCAKEGPPVDFLTPVNPIEKIEGATKDGREMRFYNSEIHRAAFILPTFVKRELEAYNSSTEKERPEKPTAKPVKMKVMRDSAITAS

SEQ ID NO: 12469 - protein, 564 aa, Zea mays
MAAAAVTSNGGAVAANGPAPGRLASVYSEVQTNRLLHTLPLPSVLRSNFSVVDGPASSAAGNPDEIAKLFPNLFGQPSASLVPSAEPAATRPLKVGVVLSGGQAPGGHNVICGIFDYLQERAKGSTLLGFKGGPAGIMKCKYVELTSDFVYPYRNQGGFDMICSGRDKIETPEQFKQAEDTANKLDLDGLVVIGGDDSNTNACLLGEYFRSRNLKTRVIGCPKTIDGDLKCKEVPTSFGFDTACKIYSEMIGNVMTDARSTGKYYHFVRLMGRAASHITLECALQTHPNAALIGEEVAAKKETLKNVTNYITDIICKRADLGYNYGVILIPEGLIDFIPEVQKLIAELNEILAHDVVDEAGAWKSKLQAESRELFEFLPKTIQEQLMLERDPHGNVQVAKIETEKMLISMVETELEKRKAEGRYSAHFRGQAHFFGYEGRCGLPTNFDSNYCYALGYGAGALLQSGKTGLISSVGNLAAPVEEWTVGGTALTSLMDVERRHGKFKPVIKKAMVELDAAPFKKYASLRDEWAIKNRYISPGPIQFSGPGSDDSNHTLMLELGAEL

SEQ ID NO: 12470 - protein, 168 aa, Glycine max
  unsure (1)..(168): unsure at all Xaa locations
MIYSPSVTTVNRAGADMGATFTDLNSMAGFPIIKTNNDITSIDTNNGRXQCIQVWPPIGNKKFETLSYLPYLDDAQLAKEVEYLLKKGWIPCLEFKSEHGFLCREHNKTPGYYYRRYCTMWKLPIEGCTDANNVVEEDKHDKTAXPNWLISIFRNDNEMQVHCISVNY

SEQ ID NO: 12471 - protein, 466 aa, Sinorhizobium fredii
MSKRFRSRSAARAARHRLRRGEQDMSNRLNTTPNDLSAFWMPFTANRQFKKEPRLFVGAKDMYYTTHDGRTVLDGTAGLWCVNAGHCRPKITEAIREQAGELDYAPAFQLGHPKAFELANRLVDIAPEGLNHVLYTNSGSESVDTALKVALAYHRAKGNGSRFRLIGRERGYHGVNFGGISVGGIVANRKMFGTLLTGVDHLPHTHLPAKNAFTRGEPKHGGDLASELERIVTLHDASTIAAVIVEPVAGSTGVLIPPKGYLQKLREICTKHGILLIFDEVITGYGRLGTPFAAQYFDVKPDIITTAKGLTNGVIPMGAVFVTSEIHDAFMTGPEHLIEFFHGYTYSGNPIASAAALGTLDTYKEEGLLTRAAELASYWEEALHSLKDCPHVIDIRNIGLIGAVELEPIAGEPTKRAFSAFLKAYEKGLLIRTTGDIIALSPPLIIEKHQIDELIDKLRDVLKNNI

SEQ ID NO: 12472 - protein, 195 aa, Zea mays
DVITGHGETMTCSKERNADLFDAVLGGLGQFGVITRARIVVEPAPARARWVRLVYTDFAAFAADQERLIAGPRQPDGTFGPMSYVEGSVFVNQSLATDLTNTGFFSDADVARIVALAAERNATTVYSIEATINYDNATSVDQELKSVLDTLSFVEGFAFQRDVSYEQFLDRVRNEEVALDKLGLWRVPHPWLNMF

SEQ ID NO: 12473 - protein, 502 aa, Arabidopsis thaliana
MAQVLSTPLAIPGPTPIQFMAGLLARIVTKNTNKETSTPESPRSPRTPQGSILMDKYEIGKLLGHGSFAKVYLARNIHSGEDVAIKVIDKEKIVKSGLAGHIKREISILRRVRHPYIVHLLEVMATKTKIYIVMEYVRGGELYNTVARGRLREGTARRYFQQLISSVAFCHSRGVYHRDLKLENLLLDDKGNVKVSDFGLSVVSEQLKQEGICQTFCGTPAYLAPEVLTRKGYEGAKADIWSCGVILFVLMAGYLPFDDKNILVMYTKIYKGQFKCPKWFSPELARLVTRMLDTNPDTRITIPEIMKHRWFKKGFKHVKFYIENDKLCREDDDNDDDDSSSLSSGRSSTASEGDAEFDIKRVDSMPRPASLNAFDILSFSDLSGLFEEGGQGARFVSAAPMTKIISKLEEIAKEVKFMVRKKDWSVRLEGCREGAKGPLTIRVEIFELTPSLVVVEVKKKGGNIEEYEEFCNKELRPQLEKLMHYQADEVEEVMCLPPEIEQ

SEQ ID NO: 12474 - protein, 312 aa, Methanothermobacter thermautotrophicus str. Delta H
MNKDALNALKFKYMKIRWSDMMNEGIINDILRVKNPRWRTSITRVEPNRIVTRGYSQEDLIGGVSFSEMVYLLIRGELPPQNVARMLEAVLVSFCDHGVTPPSTQAARMIASAGSPVHACIAGGLLAFGKNHAGAIERSMKLFQETVSSCESEDEIPDAALRLVDDHLQANRRIPGFGHRYHNADPRAVRLLELAEDYGCVGPHTSLALEVQEILLERKGVRMNVDGANAGILSDMGFDWRTGAGVFMIGRLPGLISHVYEEKVREPAFRKFFEIEEIQYDGEEKRILEADYRTLNGSEIWKTTNTKEPGRE

SEQ ID NO: 12475 - protein, 102 aa, Kluyveromyces lactis
GSRRASVGSMARPAFVNKLWSMVNDKSNEKFIHWSTSGESIVVPNRERFVQEVLPKYFKHSNFASFVRQLNMYGWHKVQDVKSGSMLSNNDSRWEFENERHA

SEQ ID NO: 12476 - protein, 467 aa, Listeria monocytogenes EGD-e
MTSVMWFRRDLRVNDNKALYHACKEDDLLLLFQVNPAQFITGSPSHQAFFASVAHFKQEVDKTALLQIMFGEPVECLKQLKETLPSWDKVYFNRDETGYGAERDEAAKTFFDEQEIEVQAFHDSYLHSAEEVKKSPTEYYKIFTPYYKKWREEIKETPFKVTLKADNIRKENLFPKYEEQFAEMTCDLPILDSGEKTANTRLANFIKHDVADYDKARDFPELDKTSHLSRYLRTGEISVRTIWQALQENEATEGRAIFEKELCWRDFYNMIYVSFPNQKNEPIQENYRFIEWENNREFFKAWQEGKTGFPLVDAAMRQLKETGWMHNRLRMVTASFLTKDLLIDWRFGEKYFQQMLIDYDPASNIGGWQWAASTGTDAVPYFRIFNPTTQSQKFDPTGKFIRKYVKELANLPDKFIHQPEKMSEIEQKEYGLLLGKDYPFPLIDHKERRKLAIARYEFSKEHYRGNI

SEQ ID NO: 12477 - protein, 107 aa, Triticum aestivum
MAGTAAIAPPPQPMAPPQPVEENATAAPSQPMAPLQPMAESATVVVVVPPPPPDGTTTFLCLILAFFIPPLGVFLKYKCEIEFWICLILTFLAYAPGIIYAVWVIVK

SEQ ID NO: 12478 - protein, 270 aa, Mycoplasma genitalium G-37
MDTYTSAKINWFPGHMKKIHDQLKKLSSQIDGIIEIVDARAPTLTHNSEIISYFLNKPKLILALKTDLAQYKPNKKILFGSLKEPFKLKKKVLKTLTTLFANKRQQLKAKGLLIKQFRLAVIGMPNVGKSSLINLLINKNHLKVANRAGITKSLNWIQISPELLLSDTPGVFLKRIDEIQIGYKLVLTNVIRREVVNIEEVGMFAFNYLKKHYKQLLPFEADSFINFLEKFAKVRGLIKKANELNTNLACEIFINELINGKYGKLSYELN

SEQ ID NO: 12479 - protein, 508 aa, Glycine max
  unsure (1)..(508): unsure at all Xaa locations
MASNDSDSQMKIVHGDAGYILEDVPHFADYIPNLPTYPNPLRSNPAYSVVKQYFVHMDDTVPQKVVVHKDSPRGVHFRRAGPRQKVYFKSDEVHACIVTCGGLCPGLNTVIREIVCGLSYMYGVNKVLGIDGGYRGFYSKNTITLTPKVVNDIHKRGGTILGTSRGGHDTGKIVDSIQDRGINQVYIIGGDGTQRGATVIYEEVRRRGLKVAIAGIPKTIDNDIPVIDKSFGFDTAVXEEAQRAINAAHVEAESIENGIGVVKLMGRYSGFIAMYATLASRDVDCCLIPESPFYLEGKGGLFEFIEKRLKENGHMVIVIAEGAGQDLLTESMQAMDQKDASGNKLLQDVGLWISHKIKDHFARKDKMPINLKYIDPTYMIRAIPSNASDNVYCTLLAQSAVHGAMAGYTGFTVGLVNGRQTYIPFIRINERQNKVVITDRMWARLLSSTNQPSFLSPKDLEEAKKAESPTQLLEENNCNDVGDAEKEQPPKDEQESGNHTDNGIKTQN

SEQ ID NO: 12480 - protein, 355 aa, Metarhizium anisopliae
MSRSNPPNAGGSRKISFNVSEQYDIQDVVGEGAYGVVCSAIHKPSGQKVAIKKITPFDHSMFCLRTLREMKLLRYFNHENIISILDIQKPRGYDTFNEVYLIQELMETDMHRVIRTQDLSDDHCQYFIYQTLRALKAMHSANVLHRDLKPSNLLLNANCDLKVCDFGLARSAASQEDNSGFMTEYVATRWYRAPEIMLTFKEYTKAIDVWSVGCILAEMLSGKPLFPGKDYHHQLTLILDVLGTPTMEDYYGIKSRRAREYIRSLPFKKKVPFRTLFPKTSDLALDLLEKLLAFNPVKRITVEEALKHPYLEPYHDPEDEPTAPPTPEEFFDFDKHKDTLSKEQLKQLIYQEIMR

SEQ ID NO: 12481 - protein, 154 aa, Glycine max
MSILPKGDSVQIREVWNDNLEEEFALIREIVDEYNYVAMDTEFPGVVLRPVGNFKNINDYNYQTLKDNVDMLKLIQLGLTFSDENGNLPTCGTESPCIWQFNFREFNVSEDIFASDSIELLRQCGIDFKKNSEDGIDVNRFRELLMCSGIVLND

SEQ ID NO: 12482 - protein, 453 aa, Corynebacterium glutamicum ATCC 13032
MSLTFPVINPSDGSTITELENHDSTQWMSALSDAVAAGPSWAAKTPRERSVVLTAIFEALTERAQELAEIIHLEAGKSVAEALGEVAYGAEYFRWFAEEAVRLPGRYGQSPSGIGHIAVTRAPVGPVLAITPWNFPIAMATRKIAPALAAGCPVLVKPASETPLTMVKVGEIIASVFDTFNIPQGLVSIITTTRDAELSAELMADPRLAKVTFTGSTNVGRILVRQSADRLLRTSMELGGNAAFVIDEAADLDEAVSGAIAAKLRNAGQVCIAANRFLVHESRAAEFTSKLATAMQNTPIGPVISARQRDRIAALVDEAITDGARLIIGGEVPDGSGFFYPATILADVPAQSRIVHEEIFGPVATIATFTDLAEGVAQANSTEFGLAAYGFSNNVKATQYMAEHLEAGMVGINRGAISDPAAPFGGIGQSGFGREGGTEGIEEYLSVRYLALP

SEQ ID NO: 12483 - protein, 144 aa, Triticum aestivum
  unsure (1)..(144): unsure at all Xaa locations
MAEEQQHQRWQEGHRLCANNCGFFGSPATLDLCSKCYRDLYQQQPAGAAAGPSAPTASAFQHSSSAVSGAAAVSPDLEPPATAPAGAKAGRCSSCRKRVGLTGFACRCGATFCGVQRYPERXACAFDFRAAGRDASRAQPVSRG

SEQ ID NO: 12484 - protein, 503 aa, Gossypium hirsutum
MAVQVPSRQLFIDGEWREPILKERLPTINPATEEIIGNIPAATAEDVELAVAAARRALSRNKGKDWATAPGAVRAKYLRAIAAKVTERKTELAKLEAIDCGKPLDEAVWDIEDVAGCFEYYADLAEGLDARQKAPVSLPMETFKSYVLKEPIGVVGLITPWNYPLLMATWKVAPSLAAGCAAILKPSELASITCLELAKVVKGSRLPPGVLNILAGLGPEAGAPLASHPDVDKIAFTGSSATGSKIMAAAAQMVKPVSLELGGKSPIIVFEDVDLDKAAEWTAFGCFWTNGQICSATSRLIVHENIAREFLDRLVKWTKNIKISDPFEEGCRLGPVVSGGQYEKVLKFISTAKSEGATILSGGVRPEHLKKGFFVEPTIITDVTTSMQIWREEVFGPVLCVKTFRTEEEALELANDTHYGLGAAVISNDLERCDRVSKNLQAGIVWVNCSQPCFCQAPWGGNKRSGFGRELGEWGLDNYLSVKQVTQYVSDEPWGWYRSPSKL

SEQ ID NO: 12485 - protein, 128 aa, Corynebacterium glutamicum ATCC 13032
MAKLTKDELIEAFKEMTLIELSEFVKEFEEVFDVTAAAPVAVAAAGAAGGEAAAAEEKDEFDVVLEDAGAKKIGVIKAVRELVSGLGLKEAKELVEGAPKAILEGANKDDAEAAKAKLEEAGAKVTLK

SEQ ID NO: 12486 - protein, 162 aa, Brassica napus
LASFLKQASEDAKKIVDEERAFARAEIESARAAVQRVEEALREHEQMSRASGKQDMEDLMKEVQEARRIKMLHQPSKVMDMEYELRALRNQLAEKSKHFLQLKKKLALCRKSEENVSLLYEIDGNEALGSCLRVRPCSDEAPESLKCTIQWYRSSSDDSKNE

SEQ ID NO: 12487 - protein, 333 aa, Triticum aestivum
MKTLLILTILAMAITISTANMQVDPSGQVQWPQQQLVPQPQQPLSQQPQQAFPQPQQTFPHQPQQQVPQPQQPQQPFLQPQQAFPQQPQQPFPQTQQPQQPFPQQPQQPFPQTQQPQQPFPQQPQQPFPQTQQPQQPFPQFQQPHQPFHQPQQQFPQPQQPQQSFPQQQRPFIQPYPQQRLNPCKNILLQQCKPASLVSSLWSIIWPQSDCQVMQQQCCQELAQIPQQLQCAAIHSVVHSIIVQQQQQQQQQQQQQQQQGMHILLPLSQQQQLGQGTLVQGQGIIQPQQLAQLEAIRSLVLQTLPTMCNVYVPPECSIIRAPFASIVAGIGGQ

SEQ ID NO: 12488 - protein, 373 aa, ASPERGILLUS NIDULANS FGSC A4
MTIPLYDQLLSHQAVNEAFVLYPGGSFGYEKRDIPTLQAERDVLVRVVATGLCGSDVHYWQHGRIGRYVVEDPIVLGHESSGIVVQCGSQSGLTVGDRVVLEPGIACNTCHFCRAGRYNLCREMRFAATPPYNGTLATYYRVPAECCYKLPSHVSLRDGALIEPLSVAVHSCRLAGDMQEKSVVVFGAGPVGLLCAGVARAFGASTVVVVDVVMSRLQSAVKYGATHTHQATSESAEENAIAILGTAGLGLGADIVLDATGAEPCMNSGIHALAPGGTFVQVGLGRPNPSLPVGQICDKEIVFKGSFRYGPGDYKTAIGLVSSHRIRLEGLVTHEFSFSQAEEAFHNVASRAGVKSVIYGPGVDEHVARATLS

SEQ ID NO: 12489 - protein, 272 aa, Microbulbifer degradans 2-40
MNKARNKVKEIMPAVDVVIEVLDARLPASSTNPMIETLRGDKPYLKVLSKSDLADPTITKAWQAFFREQRNMDSLAITTDKVSIAKTIPDRIRKLLPNRGTSLKPIRALIMGIPNVGKSTLINTLAGKKIAPVGNEPAVTKAQQKIRISDNFFLIDTPGMTWPGSKNEMINYRLAASGAIRDTALEYDDLAVFAMDYMLQRYPEAIRKRYQFDELCESATAMLEELAMKRGCKKNGLPDLTRIGELFVRELRAGKLGRFSLEEPLVSYRKRE

SEQ ID NO: 12490 - protein, 267 aa, Pseudomonas putida KT2440
MSVPSFGLGTFRLTGQTVIDSVKSALAVGYRVIDTAQIYKNEAEVGQAIAESGVPRSELFITTKIWVDNYAADKLIPSLRDSLQKLRTDYVDLLLIHWPAPGNGVELPEYMKALADAKQQGLARQIGVSNFNIELTRQAIAVVGKGEIATNQIELSPYLQNSKLTAFLKEQGITVTSYMTLAYGKVLKDPVLAQIAAKHKATVAQVALAWALQLGYAVIPSSTKRENLASNLLARGLTLDTDDMARIAKLERNGREVSPDGLAPTWD

SEQ ID NO: 12491 - protein, 272 aa, Triticum aestivum
MGNHVMSERTTLDHCYSKQIHQKGRSNVITEDPLQVKNKMTNYLMSTETTLDHYNVKPSNQKGRKNVKFEDLPEDVLRTILSKLPVKEVLKTSALSSQWRYSWTICPKLSFNSVAVRGGIRLDEQKNEQQNFIDDVSLVLQKYQGKEVENFEVKYAFDSKLVDHLNCWVSFAVSSRMRNLALDLAPTKSGGRDDRYAFPFGLFDSESLARLQCIQLSFVLLKLPMQFRGFPNLRKLDLNLLHVTSNDLENMLSNCYSLEWLSIVRCHLNDEL

SEQ ID NO: 12492 - protein, 336 aa, Gossypium hirsutum
MESDTIECVSSIDEIVEDHEIPHHNLLHHPHPRHAPHHQFSSSKPHHNGTNNVNSISNIVGPTAIAPAASVHELLECPVCTNSMYPPIHQCHNGHTLCSTCKIRVHDRCPTCRQELGDIRCLALEKVAESLELPCKYYKLGCPETFPYYSKLKHEGICIYRPYNCPYAGSECSVVGDIPFLVAHLRDDHKVDMHTGCTFNHRYVKSNPREVENATWMLTVFHCFGQYFCLHFEAFQLGMAPVYMAFIRFVGDETEARNYSYSLEFGANGRKLIRKSAPRSIRDSHRKVRDSHDGLIIQRNMALFFSGGDRKELKLRVTGRIWKEQQNPDANMCIPN

SEQ ID NO: 12493 - protein, 411 aa, Neurospora crassa
MAGQPMESRFGRMSIHDENNDPSDGARLQQKARELKSKIAQRKNPPIISSEPPSPRKPQRTVPVATKSSTIVSSAAHKSTTYAGIRRVDDDDHDELSQPMASASVSSTGTSTSESSSSAGYEQSISPKQFHLGMFEIGRPLGKGKFGRVYLARERSSGFICALKVLYKSELQHGTGVEKQVRREIEIQSNLRHPNILKLYGHFHDSKRIFLILEYAGKGELYKHLRKENRFPEWKAAQYVAQMASALKYLHRKHVIHRDIKPENILVGIHGEIKISDFGWSVHAPNNRRQTLCGTLDYLPPEMIRSGSKDNWYNEKVDLWSLGVLTYEFLVGEAPFEDTPIMTQKRIARADMTIPEWVSKEAKDLIKKLLVLDPEKRLPLEEVENHPWILKHCVKGERAANREKMASKMGN

SEQ ID NO: 12494 - protein, 321 aa, Parasitella parasitica
MAVDYLTLDRTGDKMPLRGFGCWKIEKKDAENTIYQAIKIGYRLFDGACDYGNEVEVGRGINKAIKEGLVKREELFIVTKLWNTFHSKQHVRTAFDRQLKDWGLEYFDLYLIHFPIPLQYVDPAVSYPPEWYVPHADKLNFERSPIHECWAEMEKLVQAKLTRNIGVANFNCQAILDLLSYSKIKPAVLQIEIHPLLPQERLVKWVQEQGIQVTAYSSFGPTSYVDLCESGKTYSSLLANADVKSIANKHNVNTGQILLRYALDRNIAVIPKSVHEDRMKSNLDILNIQLDQDDRKILNSLKTNQRFNDPMIFGFGLPLFD

SEQ ID NO: 12495 - protein, 474 aa, Bacillus thuringiensis serovar konkukian str. 97-27
MKKHLYINGDWKSVNTYKPLYAPYSEETLAEIAQGTEEDVKEAVAAAKNAMKEMNTLSAYDRATILEKVAQKMDERREEFAEIIAKEAAKPIRAARGEVDRTVQTYKFAAEEAKRIYGETLPLDAAPGADGRIAYTIRKPIGVIGAITPFNFPLNLVAHKVGPAIAAGNTVVLKPADQTPLSSYALIELFEEAGLPKGALNIISGPGSTVGEAIVTNDDVASITFTGSPKVGIGIKAKAGLKRVTLELGSNAAVIIDEDVELTDELIERVKWGAFVNNGQVCISVQRVFVHEERMDDFLSKLRKAMETVVVGDPLIEETDVSALISKKDVERIDNWVQEAVKEGANVLYGGNKRDERVFEPTVLTNVPEHVSVQCQEVFGPLMTVNTFKEFDEAIEQVNNSRYGLQAGVFTNNLFKAMRAIDELEVGGVMINDIPTFRVDHMPYGGVKESGTGREGIKYAIEEMTEMKLVCIKK

SEQ ID NO: 12496 - protein, 171 aa, Spinacia oleracea
MASDSSAQPKSVHEFVVRDARGNDVDLSIYKGKVLLIVNVASQCGLTNSNYTEMTELYEKYRELGLEILAFPCNQFGNQEPGSNEEVLEFACTRFKAEYPIFDKVDVNGSNAAPIYKFLKSSKGGLFGDGLKWNFTKFLVDKDGNVVDRYAPTTSPKSIEKDVKKLLGIQK

SEQ ID NO: 12497 - protein, 71 aa, Glycine max
  unsure (1)..(71): unsure at all Xaa locations
LCGAAVTTVNRAGACMVSPFTGGKSMAGFPTMNTNTDITFIVSNWGRVAXMQAWPPVGQKMFETLAYLPDL

SEQ ID NO: 12498 - protein, 250 aa, Capsicum annuum
MGKCYPTVSEEYLKAVDKCKRKLRGLIAEKNCAPLMLRLAWHSAGTYDVCSKTGGPFGTMRFKTEQSHGANNGIDIALRLLEPLGEQFPILSYADFYQLAGVVAVEVTGGPDVPFHPGREDKPEPPVEGRLPDATKGSDHLRDVFVKQMGLSDQDIVALSGGHTLGRCHKERSGFEGPWTANPLIFDNSYFKELLGGEKEGLLQLPSDKALLSDPAFRPLVEKYAADEDAFFADYAEAHLKLSELGFAEA

SEQ ID NO: 12499 - protein, 237 aa, Glycine max
  unsure (1)..(237): unsure at all Xaa locations
MTSASELFHSRRHRLGRSALDLGLDTELNAADSLRRHYHLRRLRHHPERASDRIDGRYRRSFASESVDSEENVRSSLRGSDSERLPVGVVLARARLLQRLRGEPLSTNRQYDRDSFGEDRESELSNEDPTRASLVSDLTSQMARSQFLQELNTKPPGLTQEALDCLHQEVFSSSGNEIGLESRVLXQDCSICLESFTDGDELIRLPCGHKFHSVCLDPWIRCCGDCPYCRRSIVVIN

SEQ ID NO: 12500 - protein, 335 aa, Saccharomyces cerevisiae
MSEPAQKKQKVANNSLEQLKASGTVVVADTGDFGSIAKFQPQDSTTNPSLILAAAKQPTYAKLIDVAVEYGKKHGKTTEEQVENAVDRLLVEFGKEILKIVPGRVSTEVDARLSFDTQATIEKARHIIKLFEQEGVSKERVLIKIASTWEGIQAAKELEEKDGIHCNLTLLFSFVQAVACAEAQVTLISPFVGRILDWYKSSTGKDYKGEADPGVISVKKIYNYYKKYGYKTIVMGASFRSTDEIKNLAGVDYLTISPALLDKLMNSTEPFPRVLDPVSAKKEAGDKISYISDESKFRFDLNEDAMATEKLSEGIRKFSADIVTLFDLIEKKVTA

SEQ ID NO: 12501 - protein, 340 aa, Xanthomonas campestris pv. campestris str. ATCC 33913
MKALVKREASKGIWLEQVPVPTPGPNEVLIKLEKTAICGTDLHIYLWDEWSQRTITPGLTIGHEFVGRVAELGSAVTGYQVGQRVSAEGHIVCGHCRNCRGGRPHLCPNTVGIGVNVNGAFAEYMVMPASNLWPIPDQIPSELAAFFDPYGNAAHCALEFDVIGEDVLITGAGPIGIIAAGICKHIGARNVVVTDVNDFRLKLAADLGATRVVNVSKTSLKDVMADLHMEGFDVGLEMSGNPRAFNDMLDCMYHGGKIAMLGIMPRGAGCDWDKIIFKGLTVQGIYGRKMYETWYKMTQLVLSGFPLQKVLTHQLSIDEFQKGFDLMEEGKAGKVVLSWN

SEQ ID NO: 12502 - protein, 94 aa, Brassica napus
MAGVGRNMVAPLLVLNLIMYLIVIGFASWNLNHFINGLTNRPGVGGNGATFYFLVFAILAGVVGAASKLAGVHHVRTWRGDSLATSASSSLVAW

SEQ ID NO: 12503 - protein, 504 aa, Arabidopsis thaliana
MLIVRSFTILLLSCIAFKLACCFSSSISSLKALPLVGHLEFEHVHHASKDFGNRYQLIPLAVLHPKSVSDIASTIRHIWMMGTHSQLTVAARGRGHSLQGQAQTRHGIVIHMESLHPQKLQVYSVDSPAPYVDVSGGELWINILHETLKYGLAPKSWTDYLHLTVGGTLSNAGISGQAFRHGPQISNVHQLEIVTGKGEILNCTKRQNSDLFNGVLGGLGQFGIITRARIALEPAPTMDQEQLISAQGHKFDYIEGFVIINRTGLLNSWRLSFTAEEPLEASQFKFDGRTLYCLELAKYLKQDNKDVINQEVKETLSELSYVTSTLFTTEVAYEAFLDRVHVSEVKLRSKGQWEVPHPWLNLLVPRSKINEFARGVFGNILTDTSNGPVIVYPVNKSKWDNQTSAVTPEEEVFYLVAILTSASPGSAGKDGVEEILRRNRRILEFSEEAGIGLKQYLPHYTTREEWRSHFGDKWGEFVRRKSRYDPLAILAPGHRIFQKAVSYS

SEQ ID NO: 12504 - protein, 479 aa, Mesorhizobium sp. BNC1
MNDLNLTTLEGGQTTISVPIIEALSSQLRGIALTPADAGYEEPRTIWNAMIDRRPGLIIRCAGAADVVSAVRFARENNLLVAVRGGGHNIAGNAVCDGGLLIDLSPMKSVRVDAALRRAWVEPGATLADVDKETQAFGLVVPSGINSTTGIAGLTLGGGFGWLTRKFGLTLDNLLSADVVTANGELLRTSLSENPDLFWAIRGGGGNFGVVTAFEFQLHDFGPQVLSGLVVHPFDNAASVLQQYREALDDAPDELTCWAVMRQAPPLPFLPAEWHGKEILALAMCYCGDIAEGEKATARLRSIGRPIADVVAPTPFTAWQQAFDPLLTPGARNYWKSHDFGGLSDETIDVVLEAIRRLPGPECEVFIGHVGGAAGRIATEATSFPQRSSHYVMNVHARWREPEMDQACIDWARGLFEAAKPYAIGTAYINFMPADETDRVAAAYGPNYQRLAELKARYDPTNLFRLNQNVRPTAELRAA

SEQ ID NO: 12505 - protein, 421 aa, Arabidopsis thaliana
MEKKGSVLMLRYEVGKFLGQGTFAKVYHARHLKTGDSVAIKVIDKERILKVGMTEQIKREISAMRLLRHPNIVELHEVMATKSKIYFVMEHVKGGELFNKVSTGKLREDVARKYFQQLVRAVDFCHSRGVCHRDLKPENLLLDEHGNLKISDFGLSALSDSRRQDGLLHTTCGTPAYVAPEVISRNGYDGFKADVWSCGVILFVLLAGYLPFRDSNLMELYKKIGKAEVKFPNWLAPGAKRLLKRILDPNPNTRVSTEKIMKSSWFRKGLQEEVKESVEEETEVDAEAEGNASAEKEKKRCINLNAFEIISLSTGFDLSGLFEKGEEKEEMRFTSNREASEITEKLVEIGKDLKMKVRKKEHEWRVKMSAEATVVEAEVFEIAPSYHMVVLKKSGGDTAEYKRVMKESIRPALIDFVLAWH

SEQ ID NO: 12506 - protein, 159 aa, Saccharomyces cerevisiae
MSEITLGKYLFERLKQVNVNTIFGLPGDFNLSLLDKIYEVDGLRWAGNANELNAAYAADGYARIKGLSVLVTTFGVGELSALNGIAGSYAEHVGVLHVVGVPSISAQAKQLLLHHTLGNGDFTVFHRMSANISETTSMITDIATAPSEIDRLIRTTFIT

SEQ ID NO: 12507 - protein, 280 aa, Aquifex aeolicus VF5
MRDIVFIERDPYAPIRHCYTVSKILYQGKSPYQEIQVIESPEFGRMLILDGVVQLDEKYEFLYHEYLAHVPLHAHPNPRNVLIIGGGDGGTLREVLKHDIVERAVLVDIDKEVIEVSKKYLPTLSVGFQDPRAIVVNEDGYKYVQDYENEFDVIIVDSTDPVGFAHVLTTEDFFRHVYKALKEDGIFVAQTESIHYHLEMVSNIQQRLKKVFPIVDLYTSVIPIYAGYWWTFSIASKKYPVRTPAREVKVQTKIYDADMHEYAFLPESFYNKIVNGEYKY

SEQ ID NO: 12508 - protein, 302 aa, Escherichia coli
MIKKIGVLTSGGDAPGMNAAIRGVVRSALTEGLEVMGIYDGYLGLYEDRMVQLDRYSVSDMINRGGTFLGSARFPEFRDENIRAVAIENLKKRGIDALVVIGGDGSYMGAMRLTEMGFPCIGLPGTIDNDIKGTDYTIGFFTALSTVVEAIDRLRDTSSSHQRISVVEVMGRYCGDLTLAAAIAGGCEFVVVPEVEFSREDLVNEIKAGIAKGKKHAIVAITEHMCDVDELAHFIEKETGRETRATVLGHIQRGGSPVPYDRILASRMGAYAIDLLLAGYGGRCVGIQNEQLVHHDIIDAIE

SEQ ID NO: 12509 - protein, 161 aa, Triticum aestivum
MDPMDIVGKSKEDVSLPKSTMTKIIKEMLPPDVRVARDTQDLLVECCVEFINLLSSESNDVCSRDDKKTIAPEHVIRALQDLGFKEYVEEVYAAYEQHKLETLDSPKATKFTGIEMTEEEAVAEQQRMFAEARARMNNGAAKPKEPALEPQNQPQQPPQPQ

SEQ ID NO: 12510 - protein, 170 aa, Arabidopsis thaliana
MSSNKIVLTSSDDESFEVEEAVARKLKVIAHMIDDDCADKAIPLENVTGNILALVIEYCKKHVLDDVDDSDDSTEATSENVNEEAKNELRTWDAEFMKEFDMETVMKLILAVNYLNVQDLLGLTCQTVADHMKDMSPEEVRELFNIENDYTPEEEDAIRKENAWAFEDLK

SEQ ID NO: 12511 - protein, 305 aa, Escherichia coli
MIKKIGVLTSGGDAPGMNAAIRGVVRSALTEGLEVMGIYDGYLGLYEDRMVQLDRYSVSDMINRGGTFLGSARFPEFRDENIRAVAIENLKKRGIDALVVIGGDGSYMGAMRLTEMGFPCIGLPGTIDNDIKGTDYTIGFFTALSTVVEAIDRLRDTSSSHQRISVVEVMGRYCGDLTLAAAIAGGCEFVVVPEVEFSREDLVNEIKAGIAKGKKHAIVAITEHMCDVDELAHFIEKETGRETRATVLGHIQRGGSPVPYDRILASRMGAYAIDLLLAGYGGRCVGIQNEQLVHHDIIDAIENMK

SEQ ID NO: 12512 - protein, 432 aa, Actinobacillus pleuropneumoniae serovar 1 str. 4074
MRTTELIELDQKHIWHPYSSITHPIPTYPVERADGVIITLKDGKKLIDGMSSWWAALHGYNHPRLNQAATEQLSKMSHIMFGGLTHEPAAKLSQKLLEILPPELNKIFFADSGSVAVEVAMKMALQYAQASGQKNAKKRTKFATIRSGYHGDTWHAMSVCDPVTGMHGLFNSSLPVQYFLPQPSVKFGEAWRDEAILPLQDLFEQHGDEIAALILEPVVQGAGGMYFYSPVYLQKARELCDRFGILLIFDEIATGFGRTGKLFALQHAEVVPDIICLGKALTGGYLTLSATVTTEKVATVICEGEAKCFMHGPTFMANPLACAIAYESINLLLESDWQANIQRIERQLLEELAPAKHFKSVAEVRVLGAIGVLEMQQPVDLVPLQKLFVEHGIWVRPFGKLVYIMPPFIISQAELTQLTSALLQVLKIAYNE

SEQ ID NO: 12513 - protein, 143 aa, Gossypium hirsutum
GCERTTEGYGCEEDDRRELKHESQCSYRPYSCPYAGSECTVIGDFPYLVAHLKDDHKVDMHNGSTFNHRYVKSNPHEVENATWMLTVFSCFGQYFCLHFEAFQLGISPVYIAFLRFMGDDNEAKNYSYSLEVGGNGRKMIWQG

SEQ ID NO: 12514 - protein, 400 aa, Arabidopsis thaliana
MTKKMRRVGKYEVGRTIGEGTFAKVKFARNTDTGDNVAIKIMAKSTILKNRMVDQIKREISIMKIVRHPNIVRLYEVCLFVSMHLRNFISEVLASPSKIYIVLEFVTGGELFDRIVRNFHTCRQRPLVHKGRLEESESRKYFQQLVDAVAHCHCKGVYHRDLKPENLLLDTNGNLKVSDFGLSALPQEGVELLRTTCGTPNYVAPEVLSGQGYDGSAADIWSCGVILFVILAGYLPFSETDLPGLYRKINAAEFSCPPWFSAEVKFLIHRILDPNPKTRIQIQGIKKDPWFRLNYVPIRAREEEEVNLDDIRAVFDGIEGSYVAENVERNDEGPLMMNAFEMITLSQGLNLSALFDRRQDFVKRQTRFVSRREPSEIIANIEAVANSMGFKSHTRNFKVT

SEQ ID NO: 12515 - protein, 181 aa, Lactuca sativa
MASISSSAVATVNRSTPAQASLAAPFTGLKSNVAFPVTKKANNDFSSLPSNGGRVQCMKVWPPIGLKKYETLSYLPPLSDEALSKEIDYLIRNKWVPCLEFELEHGFVYREHHHSPGYYDGRYWTMWKLPMFGCTDSAQVMKEVGECKKEYPNAFIRVIGFDSVRQVQCISFIVSKPPGVL

SEQ ID NO: 12516 - protein, 175 aa, Glycine max
  unsure (1)..(175): unsure at all Xaa locations
MASSMISSPAVTTVNRAGAGMVAPFTGLKSMAGFPTRKTNNDITSIASNGGRVQCMQVWPPVGKKKFETLSYLPDLDDAQLAKEVEYLLKKGWIPCLKFELKHSFVYQEHNXSPKYYDRHYXTIXXLAMFRYTNTSQVWKELQETKTTYANNFMHIIKFYNIRQIHYINFIGYEP

SEQ ID NO: 12517 - protein, 475 aa, Rickettsia montanensis
MNLLKNITGKNYINGEFIEFGKQISVINPATLKEIATVPNLGLSEINSAINNTVTSFSSWSQSSFEARIAILRRWYNLVIENIEELSHILTLEQGKVLAESKKEILYGVSFIDWYTYAIHNIHSTIKPGNSKAHKIVTQYEPVGPSAAITPWNFPNAMITRKVVPAIAAGCSVILKPSSLTPLSALVLAKFASDAGLPAGVFNVITGSSDIIGKAFCEDFRLRKLSFTGSTNVGKILYQNAANTLKRLSLELGGNAPFIITADNNLEKVVSDLITAKTRNSGQSCISPNRIFIEESIYEKFIEILKAKFTKLKAGDGFDKESDVGPLINSAAIEKIQKLLADAQSKGAKLICGGKAVDNFIEPTIIIDCLDNMDIFRTEIFGPVVACYKFKDLDEVIERANNTEYGLQGYVYSNNISVVQMIASKLDFGMVSINDPLPANAKAPFAGRKASGFGVEGSFEGIFEYLNTKYINLQH

SEQ ID NO: 12518 - protein, 317 aa, Streptomyces avermitilis MA-4680
MARDYYEVLGVSRSASQDEIQQAYRKLARRHHPDVNKDPGAEERFKDLNEAYSVLSDPKTRARYDRFGEDFRKIPEDFDERVAAGAGGGFRGRRTAGGGGPRVRYAPGFGDDFGAEGIDIEDLFGSMFGAGAARGGVPGADQEAELPLTVEEAYRGGRRTVTLAGPDGQPRRYEVDVPPGVTDGQRIRLAGEGGRGSGDAAAGDLYLRVRIQPHPRFRLDGRDVHVQVPVAPWEAALGATVPVPTPGGGTAKVTVPAGSSSGRRLRLRGEGMPNPRGANGDLYAELRIVVPPTLGDQERELFEELAATSSFDPRRTR

SEQ ID NO: 12519 - protein, 475 aa, Rickettsia rickettsii
MNLLKNITGKNYINGEFIEFGKQISVINPATLKEIATVPNLGLSEINSAINNTVTSFALWSQSSFEARIAILRRWYNLVIENIEELSHILTLEQGKVLAESKKEILYGASFIDWYTYAIHNIHSTIKPGNSNTHKIVTQFEPVGPSAAITPWNFPNAMIARKVVPAIAAGCSVILKPSSLTPLSALVLAKFASDAGLPSGVFNVITGSSDIIGKAFCEDFRLRKLSFTGATNVGKILYQNAANTLKRLSLELGGNAPFIITADNNLEKVVSDLVIAKTRNSGQSCTSPNRIFIEESIYEKFIEILKAKFTKLKAGDGFDKESDVGPLINSAAIEKIQKLLADAQSKGAKLICGGKTVDNFIEPTIIIDCLDNMDIFRIEIFGPVVACYKFKDLDEVIEHANNTEYGLQGYVYSNNISVAQMIASKLDFGMVSINDPLPANAKAPFAGRKASGFGVEGSFEGIFEYLNTKYINLQN

SEQ ID NO: 12520 - protein, 265 aa, Arabidopsis thaliana
MEFERYLGEGSFGSVSLFSYKRRCDVETLYAAVKTSDDAKSLYEEFQILSKFKGCSRIVQCYGSGVEQRLNDKGYVEYTIPMEYAAGGSLSDFMDRFNDKKLPDPMIRKFTRMLLEGLATIHRHGYVHCDLKPENILVFPGSVCDLKLKISDFGLSKRDGDTTWWHPLKSYAGTPIYMSPESISHGEIGKGLDLWSLGCVVLEMYTGKRPWWHTNYELEDLMKCYEPLFPPNLPCDAKLFLMTCFAPEPDERKDALTLLRQSFFR

SEQ ID NO: 12521 - protein, 234 aa, Arabidopsis thaliana
MGRGKIVIRRIDNSTSRQVTFSKRRSGLLKKAKELSILCDAEVGVIIFSSTGKLYDYASNSSMKTIIERYNRVKEEQHQLLNHASEIKFWQREVASLQQQLQYLQECHRKLVGEELSGMNANDLQNLEDQLVTSLKGVRLKKDQLMTNEIRELNRKGQIIQKENHELQNIVDIMRKENIKLQKKVHGRTNAIEGNSSVDPISNGTTTYAPPQLQLIQLQPAPREKSIRLGLQLS

SEQ ID NO: 12522 - protein, 381 aa, Ustilago maydis 521
MSTTGGAAETGANGSVASAQAAVFVQSQPLPADTPQVVGPDFEHQDPNDLLRLLESMSKVGFQASSVSKAIEIVQEMRQWRLSNDAAYLASEDADKPSLSDAQNTQCRIFLGFTSNLVSSGLREVIKFLVKNKMVSALVTTAGGIEEDLIKCLGPTYLGDFALDGATLRKQGLNRIGNLLVPNDNYCKFEDWVMPILDAMRAEQGDNVSHAWSPSRVIERLGKEINDESSILYWAAKNQIPVFCPALTDGSLGDMIYFHSYKNPGLTIDLVKDIRRLNDLSVKAPKAGMIILGGGVCKHQIANAMLFRNGADFSVYINTGQEFDGSDSGARPDEAVSWGKIKSAANGGKSVKVYCDATIIFPMIVAATFAKAYWAERELAN

SEQ ID NO: 12523 - protein, 129 aa, Guillardia theta
MNKVQNIIDQLKDLTLLEAADLVKQIEETFNVSATAAAAPINMVAATAGAGSAEAVEEKTEFDLILEDVPADKKIAVLKVVRGLTGLGLKEAKDLVEAAPKPIKEGMSKADAEAGKKQLEEAGAKATLK

SEQ ID NO: 12524 - protein, 327 aa, Arabidopsis thaliana
MNEVAIKRINRSICNGGVGFGVRKVFGKGSFGSVRLFSYKRRCDGETLYATVKTSDDAKSLYEEFQILSKFKGCPRIVQCYGNGVKQRFNDKGYVEYMIPMEYATGGSLNNFMDRFNDRKLPDPMIRKFTRMLLEGLATIHRYGYVHYDIKPENILVFPGSVYKEGAWRYSYKLKISDFGLSKRDGDTKWWHPLKSYAGTRIYMSPESISHGEIGKGLDLWSLGCVVLEMYTGKRPWWHTNYELEDLMKCYEPLFPPNLPCDAKLFLMTCFAPEPDERKDALTLLRQSFFRRDVNKLTKLLKVDNRNDFTLELKKLRQMLSEIRSMR

SEQ ID NO: 12525 - protein, 175 aa, Triticum aestivum
  unsure (1)..(175): unsure at all Xaa locations
MAPAVMASSATTVAPFQGLKSTAXGLPVGRRSSGSLGSVSNGGRIRCMQVWPIEGIKKFETLSYLPPLSTEALLKQVDYLIRSKWVPCLEFSKVGFVFREHNSSPGYYDGRYWTMWKLPMFGCTDATQVLNEVEEVKKEYPDAYVRVIGFDNLRQVQCVSFIAFRPPGCEESGKA

SEQ ID NO: 12526 - protein, 483 aa, Cupriavidus necator
MELQHTALLRTHCLIDGEWTGAQSGAELAVCNPATGERIGSVPLAGAAEAEQAVRAAERALPAWRAQTGKAVPPVLRRWADLMLAHQEDLARLMTAEQGKPLPDARGEVAYAASFLEWFGEEAKRVDGEVLASPRSSQKMLVLREPVGVCAAITPWNFPAAMITRKVGPALAAGCTIIVKPAEQTPLTALALAVLGEQAGVPRGVLQVVTGDAVQIGGVLCASPVVRKLSFTGSTAIGKLLMAQCAGTVKKLSLELGGNAPLIIFDDADMDSAVEGIIASKFRNTRQTCVCANRIYVHDRVYDEVARRLVSAVEQLLPGHGVDSGVTQGPLIDADAVAKVEAHIADALAQGATVLTGGQRHALGGTFFAPTVLANATASMRVAREETFGPLAPLFRFTSEAEVVAMANDTESGLAAYFFSRDMAKIWRVAQGLEYGMVGINTGLISNEVAPFGGVKQSGLGREGSRHGIDEYLETKYLCMEVE

SEQ ID NO: 12527 - protein, 454 aa, Bradyrhizobium japonicum USDA 110
MPLLSRQQRSAAVTLHQIPNTIKTDSFWMPFTANRQFKKAPRLFSSAEGMHYTTVDGRKVIDGSAGLWCVNAGHGRKQIAAAVERQLMTLDFAPTFQMGHPLAFDFAERLAEIAPKGLDRIFFTNSGSESVDTALKIALAYHRATGQSSRTRLIGRERGYHGVGFGGTSVGGMVANRRAFATLLPGVDHIRHTHDLSRNAFAKDQPEHGAELADDLERLVGLHGAETIAAVIVEPVPGSTAVLPPPKGYLQRLREICDKHGILLIFDEVITGFGRLGTPFAANFFGVTPDLMTTAKGITNGTIPCGAVFASRKVHDGMMVGPENQMELFHGYTYSAHPTACAAGIATLDIYKDEGLLTRGASIAEYWRDALHSLKGLPNVVDIRNCGLMGAVELAPRAGVVGARGYDVMVDCFNTGLYLRMSGDSFAMSPPLIVEKSHIDQMVSILGDAIKKVA

SEQ ID NO: 12528 - protein, 177 aa, Triticum aestivum
  unsure (1)..(177): unsure at all Xaa locations
MAPTVMASSATSVAPFQGLKSTAGLPVSRRSNGASLGSVSNGGRIRCMQVWPIEGIKKFETLSYLPPLSTEALLKQVDYLIRSKWVPCLEFSKVGFIFREHNASPGYYDGRYWTMWNCXYFGCTDATQXDQRVEEVKKEYPDAYXRIIGFXTCAXXCVSSCLQHGLKIGRLTVTTAI

SEQ ID NO: 12529 - protein, 77 aa, Glycine max
MGLWTLLEGFLLLANALAILNEDRFLTPRGWGLSDFSAGQTKSFKGQLIGLIYATQYLRFPLILLNSVFIIVKLVSG

SEQ ID NO: 12530 - protein, 347 aa, GIBBERELLA ZEAE PH-1
MTDDTHRKIWQPLHPTIRDRLDPQYVAYHEAHLQYIEPDEIKDWDGSTRTKKVSLPPGGTKPVPVGSIDDYHVGRFKVRVYTPTGQCDERGWPVLVWLHGGGWAVGGLNNGTDLCCWACEKARCLVVSVDYGLAPENPFPVAVEDSIDAVRWVASCPAQLQKIDTSRISVSGTSSGANLAIVAALSASNPEAALPTARPSLSNTIAHPPVSLLLFIPVVDNTATVDGVWKPNAEVAPWLTPSRMEWYRKLYFTQDEHRSRWDASPNLAPDTLLKKLPKTWIAIAEMDILATEASTFSQQLKGLGVNVETLLVEGGTHSILSLHGVIDRGYKMIEDAIKHLQETFGTG

SEQ ID NO: 12531 - protein, 350 aa, Glycine max
  unsure (1)..(350): unsure at all Xaa locations
MFTCIACTKTDDKDEEGGSRESGTPSTKEAVKSLTTQIKDMALKFSGAYKQCKPCTGSSSYKKGHRPYPDFDTISEGVPYPYIGGASSSSTPAWDFTTSHYPXGRSDPRFAGAYGGDRTPRGRDSSSVCDVVLEDEDEPKEWMAQVEPGVHITFVSLPNGGNDLKRIRFSREMFNKWQAQRWWGENYDRIMELYXNVQRFNKQALNTPPRSEDEQRDSSYSRLTSARESPMASNKDWTPRSHYKFSGSRGYYPSEPLDHGGGSGQYHAGPSMEPARDTTASRDEPSISNASEMETEWVEQDEPGVYITIRQLADGTRELRRVRFSRERFGEVNAKTWWEENRERIQAQYL

SEQ ID NO: 12532 - protein, 568 aa, Zea mays
APRGVEPRLFVARAAGPAQQAADAKACSALCSPAARAVPAMESFGVPPAPVAAPEKRKKPLDLKDPVPAAAAAAANGGGATKASPAAKWAEKKKLVGGDAGYVLEDVPHLTDYLPQLPTYPNPLQDNPAYSVVKQYFVNPDDTVTQKIVVHKTSARGTHFRRAGPRQRVYFQPDEVNAAIVTCGGLCPGLNTVIRELVCGLYDMYGVTSVVGIEGGYKGFYSKNTVALTPRSVNGIHKRGGTVLGTSRGGHDTAKIVDCLQDRGINQVYIIGGDGTQKGASVIYEEVRRRGLKCAVVGVPKTIDNDIAVIDKSFGFDTAVEEAQRAINAAHVEAESAENGIGVVKLMGRNSGFIAMYATLASRDVDCCLIPESPFYLEGKGGLLEFVERRLKDNGHMVIVVAEGAGQDLIAKSMNSVDTQDASGNKLLLDVGLWLSQKIKDHFKKKPRFPITLKYIDPTYMIRAVSSNASDNVYCTLLAHSALHGAMAGYTGFIVAPVNGRHAYIPFYRITEKQNKVVITDRMWARVLCSTNQPCFLSHEDVENMKHDDDEHHLHNTLLLDSPENSSK

SEQ ID NO: 12533 - protein, 126 aa, Zea mays
FQAQDPVEASHFQSDGRVLYCLELTKNFNSDDTDTMEQEVTVLLSRLRFIQSTLFHTDVTYLEFLDRVHTSELKLRAQGLWEVPHPWLNLLIPRSSIRRFAKEVFGKILKDSNNGPILLYPVNKSK

SEQ ID NO: 12534 - protein, 491 aa, Ralstonia eutropha JMP134
MKTQEVLPICIAGEWRLGTGDRYATRYPATGEVVAELNAASLADVEEAVQGAQRAFETSGWARRKPHERAAVLYRVAELIRAQAEPLAQRQRLDNGKPISETRALVASAASTFQFFAAACETLEEQITPQRGECLTMSVYEPMGVVAAITPWNSPIASEAQKMAPALAAGNAVVVKPAEVTPLMALELARICDEAGVPKGLISVLPGKGSVIGDAITKHPLVRRVSFTGGTTTGKHIAHIAADKMMPVSLELGGKSPTMVFDDADLDHAVNGVLYGIFSSSGESCIAGSRLFVARSQYEPFIERLAAGAAHLRVGDPADERTQMGPLITDRHRDSIESYVAMGVQDGGQLRTGGLRPDVAGLPNGYFYTPTIIEGLDNHARIAQEEIFGPVLVAIPFDDEDDLIEQANDSVYALAAGIWTRDYKRAWRVARAVQAGNVWINTYKQFSISAPFGGWRDSGLGREKGRLGILQYMEQKSVYWGLNEQPLPWAN

SEQ ID NO: 12535 - protein, 221 aa, Azoarcus sp. EbN1
MENRIGTMTRSEASVLSTNRVIRNTYMLLSLTLAFSALTAGASLALGLPHPGIILTLVGYFGLLFLTTKFRDSGLGILFVFALTGFMGYTLGPIVSHYLAMPNGGQVVMQAMGGTAAIFLGLSAYALTSRKDFSFMGGFLVVGILVAFLAGLGAIFFEMPGLSLAVSAMFVLLMSGLILYETSNIIHGGETNYVMATVTLYVSIYNLFTSLLHILGVMNND

SEQ ID NO: 12536 - protein, 91 aa, Glycine max
  unsure (1)..(91): unsure at all Xaa locations
MSRKIESLGVERVISGEGSHGMFGGYLYFSKAPSKEEFLPEAMRXIKALLXYDCLRATRSTFDRGLEARVPFLNKECYEXAMNIDPQCAMI

SEQ ID NO: 12537 - protein, 286 aa, Cucurbita cv. Kurokawa Amakuri
MALPVVDTEYLKEIEKARRDLRALIANRNCAPIMLRLAWHDAGTYDVSTKTGGPNGSIRNQEEYSHGSNNGLKKAIDFCEEVKSKHPKITYADLYQLAGVVAVEVTGGPTIDFVSGRKDSRISPREGRLPDAKKGAPHLRDIFYRMGLSDKDIVALSGGHTLGRAHPERSGFDGPWTEDPLKFDNSYFVELLKGESEGLLKLPTDKALLEDPEFRPYVELYAKDEDAFFKDYAESHKKLSELGFTPGSARAIANDSTVLAQGAVGVAVAAAVVILSYFYEIRKNLK

SEQ ID NO: 12538 - protein, 454 aa, Listeria monocytogenes str. 4b H7858
METYFEDAVGGIHLLPFFPSTGDRGFAPSDYTTVDSDLGSWEIIEKLGEKYYLMFDFMINHISRESLFFQDFKKEHLNSKYKDMFIRINDFFPPGRPNEKDLDLIYKRKDKAPFQEVEFADGGTELVWNTFGEEQIDLDVTAEVTKEFIRQTIKNMAAHGCSILRLDAFAYAIKKLDTNDFFVEPEIWGLLDEVKAEAAKYDMELLPEIHEHYSIQMKIANHDYYIYDFALPMVMLYSLYSGRVERLAKWLEMSPMKQFTTLDTHDGIGVVDARDLLTDEELDYTSAELYKIGANVKKIYSSEKYNNLDIYQINSTYYSALGDDDKSYLLARVIQCFAPGIPQIYYVGLLAGKNDIDLLEETKEGRNINRHYYTIDEIKNEVKRPVVKALCNLLRFRNTSEAFDLEGSIEIETPSSNEIVIIRKNKTNKITAILKANLSTKTFQISENERNILI

SEQ ID NO: 12539 - protein, 327 aa, Zea mays
SSSQRPAYSVLAYIEPSALRVRLAVRHPSQDYPGGRRTEGKGTEPTTNPMPPHRAGGAAGGGDTSAFFAATLVLWAVSVGFEIGVRGRRELAPVAAGFAFFQAANTAVRGSVSRDPLFVNTAVSLLHSSLTSVSVIFVLANQWRNKGLENMFEHEELFGGSWIGAYSALCFSCGYFAYDQLDMLRYRLYSGWLPGILMHHLILLICFTLALYRNVTINYLNLSLVCELHSIFLHVRKVRRMVGFRDFDRTVVKLEWVLNWTTFVTARVICHILITYKLISDAHKFGKGIELPLALLGMAGMNLLNIFLGLDLLKAFTRERNKQNHQD

SEQ ID NO: 12540 - protein, 486 aa, Vibrio vulnificus YJ016
MEVTAHYIGGKPFVGDTGESFATLNPATGEVLAHIEQADERVLAHAIESAKLGFSVWSSMSAAERSRCLLKAAQLIRDHNDELAELEVRDTGKPIQEASVVDIATGADVIEYFAGLVNGLGGEQQSLGSNQFFYTRREPLGICAGIGAWNYPIQIAMWKAAPALAAGNAMIFKPSEETPLSALKLAELFTQAGVPDGVFNVVQGDYRVGQMLTAHPEIAKVSFTGESGTGKKVMADSAATLKPVTMELGGKSPLIIFDDADLDDAVSAAMVANFYTQGEVCTHGTRVYVQRAMYDAFVEQLKERTEKLIVGDPMNMETQIGSLISKSHLEKVLGAISSAKESGATLLTGGFQVTERGLEKGCFVAPTVFVDCRDEMPHVQNEIFGPVMSVLVFDDEDEVIARANNTQYGLAAGVFTQNLSKAHRVIHQLQAGICWINTWGNSPAEMPVGGYKLSGIGRENGQETLLHYTQTKSVFVELGAFDSPYA

SEQ ID NO: 12541 - protein, 212 aa, Zea mays
  unsure (1)..(212): unsure at all Xaa locations
MDEEEHEVYGQEIPEDGDMDGADVDMAASGDDAAKLQELDEMKRRLKEMEEEXAALRDMQAKVAKEMQGGDPSTSTAEAKEQVDARSVYVGNVDYACTPEEVQQHFQACGTVNRVTILTDKFGQPKGFAYVEFLEQEAVQEALNLNESELHGRQIKVAPKRTNVPGMKQRPPRGYNPYHGYPYRSYGAPYXXXYGYGRAPRFRRPMRYRPYF

SEQ ID NO: 12542 - protein, 363 aa, Yersinia pestis
MTKTYHIAVLPGDGIGPEVMAQASKVLDAVRQRFGLKISTSVYDVGGAAIDRHGSPLPAATVAGCEQADAILFGSVGGPKWEHLPPAEQPERGALLPLRKHFKLFSNLRPARLYQGLEDFCPLRSDIAARGFDILCVRELTGGIYFGQPKGREGQGMHERAFDTEVYHRFEIERIARIAFESARKRRSKVTSIDKANVLQSSILWREVVNGIAADYPDVALSHMYIDNATMQLIKDPSQFDVLLCSNLFGDILSDECAMITGSMGMLPSASLNEQGFGLYEPAGGSAPDIAGKNIANPIAQILSLTLLLRFSLGKDDAADAIERAINQALEQGYRTADLAGDGHAIGTHEMGDIIAKFVVEGV

SEQ ID NO: 12543 - protein, 259 aa, Hydrogenobacter thermophilus
MERIWKTGITQHIGHETYIRGYRLLDLVGNLSFAQAIYLILKGELPTERESRMMEAMLVSVIDHGIAPPSAIAARSVASGGNSLNVGVAAGVLAFGSAHGGALEDAMRFIQEGVSSKRSVEDIVKEYLETKKPIPGYGHRYYKDFDPRTKRLMDIARVLEFYGEHCKFAEDVAEEIGRQKGKKLVLNVDGAIAAIASEMGFDWRLGKGFFIIGRVPGLVAHVYEELTTEKPFSKRLDEERDVEYTGSPPRELPQELKKI

SEQ ID NO: 12544 - protein, 335 aa, Xanthomonas campestris pv. campestris str. ATCC 33913
MTQTITVIRGDGIGPEIMDATLFVLDALQAGLTYEYADAGLVALEKHGDLLPESTLASITKNKVALKSPLTTPVGEGFSSINVAMRRKFDLYANVRPAKSFPNTKSRFADGVDLITVRENTEGAYLSEGQEVSADGEVAVSGARVTRKGSERIVRYAFDLARATGRKKVTAVHKANIIKSTSGLFLKVARDVATQYPEIEFQEMIVDNTCMQLVMRPEQFDIIVTTNLFGDIISDLCAGLVGGLGLAPGANIGVDAAIFEAVHGSAPDIAGQGKANPCALLLGAAQMLDHIGQPQNAERLREAIVATLEAKDSLTPDLGGTGNTMGFAKAIASRL

SEQ ID NO: 12545 - protein, 176 aa, Glycine max
  unsure (1)..(176): unsure at all Xaa locations
MASSMISSPAVTTVNRAGAGMVAPFTGLKSMAGFPTRKTNNDITSIASNGGRVQCMQVWPPVGKKKFETLSYLPDLDDAQLAKEVEYLLRKGWIPCLEFELEHGFLYHEHNRSPXYYDGRYWTMWKLPMFGCADASHVLKDLXDAKTGYPDGXVRIMGCDTFGSADRELICYNLPR

SEQ ID NO: 12546 - protein, 410 aa, Glycine max
MPGHRSKSEKHGGGGEKPLRRDPYEVLGISRNSTDQEIKTAYRKMALKYHPDKNANDPKAADMFKEATFSYNILSDPDKRRQYDSAGFEAVESDNQELELDLSSLGAVNTMFAALFSKLGVPIKTTVSATVLEEALNGLVTIRPLPLGHNIAKRVEKQCAHFYSVTITEEEAQAGFVCRVQSPDKSKFKLLYFDQEDNSGLSLALQEDSAKTGKVTSAGMYFLGFPVYRLDQTMNSIAAAKDPDTSFFRKLDAFQPCELTELKAGTHVFAVYGDNFFKSANYTIEALCAAPFSEEKENLRNIEAQILSKRAEISKFEAEYREVLAQFSDMTNRYAHEMQAIDELLKNRNEIQASYTSAPLKRTTSRSRSKNSSKEAKEDGQAKEKRSTRERPKKKKWYNLHLRVDKRKAC

SEQ ID NO: 12547 - protein, 505 aa, Brucella melitensis 16M
MNKVEFSRTVKPAFAKRYGNFIGGKWVEPRSGRYFENTSPVNGQVLCEVARSDAADVEAALDAAHAARELWGRTSVAERALILNRIADRIEENLPALAAAETWDNGKPIRETTNADLPLAVDHFRYFAGVIRAQEGGISEIDHDTVAYHFHEPLGVVGQIIPWNFPLLMATWKLAPALAAGNCVVLKPAEQTPASILVLMELIADILPPGVVNIVNGFGLEAGKPLASSPRIAKIAFTGETTTGRLIMQYASQNLIPVTLELGGKSPNIFFKDVAAEDDDFLDKAIEGFVMFALNQGEVCTCPSRALIQESIYDRFMEKALKRVEAIVQGDPLDPATMIGAQASSEQLEKILSYLDIGRQEGAEVLAGNERNMLPGDLAGGYYVKPTVFKGHNKMRIFQEEIFGPVVSVATFKDDAEALSIANDTLYGLGAGIWTRDGTRAYRFGRAIKAGRVWTNCYHAYPAHAAFGGYKQSGIGRENHLKMLDHYQNTKNMLVSYSPKKLGFF

SEQ ID NO: 12548 - protein, 331 aa, Cicer arietinum
MSNKIWPPPPSNNPYEYLKIHHNPNDTLTRNLVDPHTSPSSNTTLPINVLTKDLTINQSHQTWLRLFLPKNSTNPNQNNKLPLIIFFHGGGFILLSAASTIFHDFCVELADTVEAVVASVEYRLAPEHRLPAAYDDAMEALTFIKSSEDEWLQNYVDFSTCYLMGNSAGATIAYNAGPMCNLKKVNDFEPLKIQGLILSQPFFGGTQRSESELRLENDPVLPLSVGDLMWELALPIGVDRDHKYGNLTAENDLDEKFDKIKDQGWRVLVSGNGGDPLVDRYKELVELMEKKGVEIVKDFEEEGFHGIEFFEPSKAKKLIGLVKGFISSFVV

SEQ ID NO: 12549 - protein, 302 aa, Cucumis sativus
MAFAKAQKTKAYFKRYQVKFKRRREGKTDYRARIRLINQDKNKYNTPKYRFVVRTSNKDITAQIISASIAGDLVLASAYSHELPQYGLEVGLTNYAAAYCTGLLLARRVLKMLEMDAEYEGNVEATGEDYSVEPADTRRPFRALLDVGLIRTTTGNRVFGALKGALDGGLDIPHSDKRFAGYAKNGQQLDVEVHRKYIFGGHVAAYMRTLMEDEPEKYQSHFSEYIKKGIEADELEGLYKKVHAAIRANPIAKKSDKPQPKAHKRYNLKKLTYDERKARLVERLNALNSAADGDDDDDEDDE

SEQ ID NO: 12550 - protein, 214 aa, Zinnia elegans
MAIEICVKAATGAPDDLGDCPFSQRVLLTLEEKKVPYKTHLINLDNKPEWFVEVNPDGKVPLIKFDEKWVSDSDVIVGLIEEKYPEPSLSTPSEFASVGSKIFPKFVGFLKSKDEKDGTEQALLDELNELEEHLKKNGPYVNGEKISAVDLSLAPKLYHLKVALGHFKKWTVPESLTHVHDYMKSLFSRESFEKTKPAKEEYVVAGWAPKVNNA

SEQ ID NO: 12551 - protein, 1342 aa, Escherichia coli O157:H7 EDL933
  unsure (1)..(1342): unsure at all Xaa locations
MSQEYTEDKEVTLTKLSSGRRLLEALLILIVLFAVWLMAALLSFNPSDPSWSQTAWHEPIHNLGGMPGAWLADTLFFIFGVMAYTIPVIIVGGCWFAWRHQSSDENIDYFAVSLRIIGVLALILTSCGLAAINADDIWYFASGGVIGSLLSTTLQPLLHSSGGTIALLCVWAAGLTLFTGWSWVTIAEKLGGWILNILTFASNRTRRDDTWVDEDEYEDDEEYEDENHGKQHESRRARILRGALARRKRLAEKFINPMGRQTDAALFSGKRMDDDEEITYTARGVAADPDDVLFSGNRATQPEYDEYDPLLNGAPITEPVAVAAAATTATQSWAAPVEPVTQTPPVASVDVPPSQPTVAWQPVPGPQTGEPVIAPAPEGYPQQSQYAQPAVQYNEPLQQPVQPQQPYYAPAAEQPAQQPYYAPAPEQPVAGNAWQAEEQQSTFAPQSTYQTEQTYQQPAAQEPLYQQPQPVEQQPVVEPEPVVEETKPARPPLYYFEEVEEKRAREREQLAAWYQPIPEPVKEPEPIKSSLKAPSVAAVPPVEAAAAVSPLASGVKKATLATGAAATVAAPVFSLANSGGPRPQVKEGIGPQLPRPKRIRVPTRRELASYGIKLPSQRAAEEKAREAQRNQYDSGDQYNDDEIDAMQQDELARQFAQTQQQRYGEQYQHDVPVNAEDADAAAEAELARQFAQTQQQRYSGEQPAGANPFSLDDFEFSPMKALLDDGPHEPLFTPIVEPVQQPQQPVAPQQQYQQPQQPVAPQPQYQQPQQQVAPQPQYQQPQQPVAPQQQYQQPQQPVAPQPQYQQPQQPVAPQPQYQQPQQPVAPQPQDTLLHPLLMRNGDSRPLHKPTTPLPSLDLLTPPPSEVEPVDTFALEQMARLVEARLADFRIKADVVNYSPGPVITRFELNLAPGVKAARISNLSRDLARSLSTVAVRVVEVIPGKPYVGLELPNKKRQTVYLREVLDNAKFRDNPSPLTVVLGKDIAGEPVVADLAKMPHLLVAGTTGSGKSVGVNAMILSMLYKAQPEDVRFIMIDPKMLELSVYEGIPHLLTEVVTDMKDAANALRWCVNEMERRYKLMSALGVRNLAGYNEKIAEADRMMRPIPDPYWKPGDSMDAQHPVLKKEPYIVVLVDEFADLMMTVGKKVEELIARLAQKARAAGIHLVLATQRPSVDVITGLIKANIPTRIAFTVSSKIDSRTILDQAGAESLLGMGDMLYSGPNSTLPVRVHGAFVRDQEVHAVVQDWKARGRPQYVDXITSDSESEGGAGGFDGAEELDPLFDQAVQFVTEKRKASISGVQRQFRIGYNRAARIIEQMEAQGIVSEQGHNGNREVLSPPPFD

SEQ ID NO: 12552 - protein, 432 aa, Dechloromonas aromatica RCB
MSTREQQIAALEKDWAENPRWKGIKRGYSAADVVRLRGSFQVEHTLARRGAEKLWDLVNNTPYVNCLGALTGGQAVQQAKAGIKAIYLSGWQVAADNNEYAAMYPDQSLYPVDSVPKVVERINNSFNRADEIQWSKNINAGDAGHVEYHLPIVADAEAGFGGVLNAYELMKAMIRAGAAGVHWEDQLASVKKCGHMGGKVLVPTTEAVQKLIAARMAADVYGVPTLVIARTDAEAADLLTSDYDENDKPFLTGERTAEGFYKTRKGLDQAISRAIAYADYADLVWCETGTPDLEYARKFAEAVHKVHPGKMLAYNCSPSFNWKKNLDDATIAKFQKELGAMGYKYQFITLAGIHSMWYNMFDLAQDYAARGMSAYVEKVQEPEFAARDRGYTFVSHQQEVGTGYFDDVTTVIQGGKSSVTALTGSTEEEQFH

SEQ ID NO: 12553 - protein, 449 aa, Glycine max
  unsure (1)..(449): unsure at all Xaa locations
SSRACQKYGSIFKRPQGLFIXLKEKGKILEVLKNWPEKSIQVIVVTDGERILGLGDLGCQGMGIPVGKLALYTALGGVRPSACLPITIDVGTNNEKLLNDEFYIGLRQKRATGQEYSELLHEFMTAVKQNYGEKVLVQFEDFANHNAFELLAKYGTTHLVFNDDIQGTASVVLAGVVAALKLIGGTLADHTFLFLGAGEAGTGIAELIALEMSKQTKTPIEETRKKIWLVDSKGLIVGSRKASLQHFKQPWAHEHEPVGSLLEAVKVIKPTVLIGSSGVGKTFTKEVIEAVTSINEKPLVLALSNPTSQSECTAEEAYQWSEGRAIFASGSPFDPVEYKGKVYYSGQANNAYIFPGFGLGLVISGAIRVHDDMLLAASEALAKLVSNENYEKGLIYPPFSNIREISANIAASVAGKAYELGLATRLPRPQNLVKYAESCMYSPVYRNYR

SEQ ID NO: 12554 - protein, 343 aa, Burkholderia fungorum LB400
MKALAKLERAPGLTLTDVKKPEVGHNDVMIRITRTAICGTDIHIWKWDDWAQKTIPVPMHVGHEYVGEIVEMGQEVRGFAIGDRVSGEGHITCGFCRNCRAGRRHLCRNTVGVGVNREGAFAEYLVIPAFNAFKIPPEISDDLAAIFDPFGNATHTALSFNLVGEDVLITGAGPIGIMAVAIAKHVGARNVVITDVNDYRLELARKMGATRAVNVSRESLRDVMADLHMAEGFDVGLEMSGVPSAFTGMLEAMNHGGKIALLGIPPAQTAIDWTQVIFKGLEIKGIYGREMFETWYKMVAMLQSGLDLSPILTHHFKVDDYREAFATMLSGESGKVILDWTAA

SEQ ID NO: 12555 - protein, 319 aa, Thermotoga maritima MSB8
MKKIAVLTSGGDAPGMNAAVRAVVRYGVRQGLEVIGVRRGYSGLIDGDFVKLEYKDVAGITEKGGTILRTSRCEEFKTEEGRELAAKQIKKHGIEGLVVIGGEGSLTGAHLLYEEHKIPVVGIPATIDNDIGLTDMCIGVDTCLNTVMDAVQKLKDTASSHERAFIVEVMGRHSGYIALMAGLVTGAEAIIVPEIPVDYSQLADRILEERRRGKINSIIIVAEGAASAYTVARHLEYRIGYETRITILGHVQRGGSPTAFDRRLALSMGVEAVDALLDGEVDVMIALQGNKFVRVPIMEALSTKKTIDKKLYEIAHMLS

SEQ ID NO: 12556 - protein, 341 aa, Glycine max
IRLERLEQRLTKCQPFDAPEPNQLIWPNLKIKYFQRELRQYLVYFIVALTIFFYMIPITFISAFTTLDNLVKYLPFIKPIVNIKALRTVLEAYLPQLALIIFLALLPKLLLFLSKFEGIPTESHAVRAASGKYFYFTVLNVFIGVTIGGTLFKAFKRIREHPTLDEISSLLAESLPGNATFFLTYVALKFFIGYGLELSRIVPLIIYHLKRKYLCKTEAELKEAWRPGDLGYGTRVPGDMLIVTIVFCYSVIAPVIIPFGALYFGLGWLVLRNQALKVYVPTFESYGRMWPHIHNRILASLILYQITMFGYFGTQKFYYTPLVLPLPILSLIFGFVCAKKF

SEQ ID NO: 12557 - protein, 454 aa, Populus sieboldii x Populus grandidentata
DLNHRNLTDLAKKFGDILLLRMGQRNLVVVSSPDLAKEVLHTQGVEFGSRTRNVVFDIFTGKGQDMVFTVYGEHWRKMRRIMTVPFFTNKVVQQYRHGWEEEAAQVVEDVKKNPEAATHGIVLRRRLQLMMYNNMYRIMFDRRFESEEDPLFNKLKALNGERSRLAQSFDYNYGDFIPILRPFLRGYLKICKEVKERRLQLFKDYFVEERKKLGSTKSMSNEGLKCAIDHILDAQKKGEINEDNVLYIVENINVAAIETTLWSIEWGIAELVNHPEIQKKLRDELDTVLGPGHQITEPDTYKLPYLNAVIKETLRLRMAIPLLVPHMNLHDAKLGGFDIPAESKILVNAWWLANNPAKWKNPEEFRPERFFEEEAKVEANGNDFRYLPFGVGRRSCPGIILALPILGITLGRLVQNFELLPPPGQSKIDTSEKGGQFSLHILKHSTIVAKPRSF

SEQ ID NO: 12558 - protein, 372 aa, Bacillus methanolicus
MTVTRGLEGVVATTSSISSIIDDTLTYVGYNIDDLADNASFEEVIFLLWHRKLPTKSELEELKILLAENAELPKEILDHFKMYPIDKVHPMAALRSAVSLLGLYDEEADLMDEEANYRKAIRLQAKIPSIVAAFARVRKGLEPVAPRKDLSFAANFLYMLKGKEPEDIAVEAFNKVLVLHADHELNASTFTARVCVATLSDIYSGVTAAIGALKGPLHGGANEAVMKMLTEIGSLENVEPYIREKLAKKEKIMGFGHRVYRKGDPRAKHLREMSKKLTELTGEPHWYEMSTKIEAIVTGEKGLPPNVDFYSASIYHSLGIDHDLFTPIFAVSRISGWLAHILEQYENNRLIRPRADYIGPGMQKFIPIEQRG

SEQ ID NO: 12559 - protein, 66 aa, Glycine max
ICYTENQVNGEIYNHEELRKQLPNHTFRTGSDCDVIAHLYEEHGENFVDMLDGIFSFVLLDTRDNS

SEQ ID NO: 12560 - protein, 168 aa, Avena sterilis subsp. ludoviciana
VMASSATSVAPFQGLKSTAGLPVSRRSNAGLGSVSNGGRIRCMQVWPIEGIKKFETLSYLPPLTEEALLKQIDFLIRSKWVPCLEFSQGGFIFREHGSTPGYYDGRYWTMWKLPMFGCTDASQVIKEVEEVKKEYPDAYVRIIGFDNIRQVQCVSFIAFKPPGCEESG

SEQ ID NO: 12561 - protein, 358 aa, GIBBERELLA ZEAE PH-1
MASATRQFARAATRATRNGFAIAPRQVIRQQGRRYYSSEPAQKSSSAWIWLTGAAVAGGAGYYFYGNSASSATAKVFNPSKEDYQKVYNEIAARLEEKDDYDDGSYGPVLVRLAWHASGTYDKETGTGGSNGATMRFAPESDHGANAGLAAARDFLQPVKEKFPWITYSDLWILAGVCAIQEMLGPAIPYRPGRSDRDVSGCTPDGRLPDASKRQDHLRGIFGRMGFNDQEIVALSGAHALGRCHTDRSGYSGPWTFSPTVLTNDYFRLLVEEKWQWKKWNGPAQYEDKSTKSLMMLPSDIALIEDKKFKPWVEKYAKDNDAFFKDFSNVVLRLFELGVPFAQGTENQRWTFKPTHQE

SEQ ID NO: 12562 - protein, 261 aa, Nicotiana tabacum
MEAANHNNDNGCTNESPYISSVLPGWFSEISPLWPGEAHSLKVEKILFQGKSDYQNVMVFQSSTYGKVLVLDGVIQLTERDECAYQEMIAHLPLCSIPNPKKVLVIGGGDGGVLREVSRHSSVEQIDICEIDKMVVEVSKQFFPDVAVGYEDPRVNLHIGDGVAFLKNVAAGTYDAVIVDSSDPIGPAQELFEKPFFDSIARALHPGGVVSTQAESIWLHMHIIEEIVANCRQIFKGSVNYAWTTVPTYPSGMIGFMLCST

SEQ ID NO: 12563 - protein, 492 aa, GIBBERELLA ZEAE PH-1
MHFNTLTCVLVGLVAHTSAVPTKREAVNSCLTQAKVPTDAQGSQSWKEDGTAYNLRLPFEPAAIAVPTTVAQVSAAVECGAKHGVAISAKSGGHSYTSLGFGGEDGHLMIELDRMYSVKLAKDGTAKIQPGARLGHVATELWNQGKRALAHGTCPGVGLGGHALHGGYGMVARKHGLTLDLMIGATVVLPTGKVVHCSKTENSDLFWGIRGAGANFGVVVELEFQTFAAPEKITYFDIGLNWDQNTAPQGLYDFQEFGKGMPAEITMQMGVSKNGYSVDGAYIGDEASLRKALQPLVQKFGGVQVTATTVDWMGLVTHFAGAGVNVNPTSASYDAHDNFYASSLAAPALTLAEFKSFVNFVSTTGKSSSHSWWLQMDITGGTYSAVSKPKPSDTAYVHRDTLLLFQFYDSVAATAQYPSDGFNLIKGLRQSISSSLKAGTWGMYANYPDSQIKNDRATEMYWGSNVAKLEAVKAKYDPKNLFRNPQSIKPKA

SEQ ID NO: 12564 - protein, 154 aa, Rubrivivax gelatinosus PM1
MASGRRFVAAALLAGLLAGPAVAKDAPPLAEDPVLEARVMRIAAELRCLVCQNQTIADSHADLAVDLRRQVRSMLSEGRSQAEILQYMTDRYGDFVLYRPPVRTSTWLLWFGPFVLLVGGLVTLLLVLRRRARLSDDHFEPDEDDADGAGPRAP

SEQ ID NO: 12565 - protein, 168 aa, Triticum aestivum
  unsure (1)..(168): unsure at all Xaa locations
MAPTVMASSATSVAPFQGLKSTAGLPVSRRSNGASLGSVSNGGRIRCMQVWPIEGIKKFETLSYLPPLSTEALLKQVDYLIRSKWVPCLEFSKVGFIFREHNASPGYYDXRYWXTMWKLPMFGCXDATQVIXQVEXVKKEYLTRIPHHRIHNMRKMRQLAKPAQDPEG

SEQ ID NO: 12566 - protein, 269 aa, Corynebacterium glutamicum ATCC 13032
MTLSLPPIGFGTVHLDGAPGVEAIATAIDAGYRLIDTAYNYENEGTVGKAVRESGVPREELIVTSKLPGRFHARDLGRVRIEESLYRLNLDYIDLLLIHWPNPSKDLYVEAWETLIEVRDAGLVKHIGVSNFLPNHIDRLRRETGELPAVNQIELHPYFPQVEQVDFHDELGIITEAWSPLSNGRGLVEEPLLKEIGERYGVGSGEIALAWHHARGIVPIPRSTNPARQRSNLEAVKISLIDEDVQAITALARKNGRIKDQDPAVYEEF

SEQ ID NO: 12567 - protein, 122 aa, Euglena longa
MIQTQTYLNVSDNSGAKKIMCISIISTKRKYAKIGDTIIAVVKKASPNKIIKKSMIVKALIIRTTKPLYRKHNNMYISFNENAAIIINTDNTLKGTNIFGPVPRELMNIGFTNLNSTAKLII

SEQ ID NO: 12568 - protein, 343 aa, Thermus thermophilus HB27
MRALAKLAPEEGLTLVDRPVPEPGPGEILVRVEAASICGTDLHIWKWDAWARGRIRPPLVTGHEFSGVVEAVGPGVKRPQVGDHVSLESHVVCHACPACRTGNYHVCLNTKILGVDRDGGFAEYVVVPAENAWVNPKDLPFEVAAILEPFGNAVHTVYAGSGVSGKSVLITGAGPIGLMAAMVARASGAGPILVSDPNPYRLAFARPYADRLVNPLEEDLLEVVRRVTGSGVEVLLEFSGNEAAIHQGLMALIPGGEARILGIPSDPIRFDLAGELVMRGITAFGIAGRRLWQTWMQGTALVYSGRVDLSPLITHRLPLSRYREAFGLLASGQAVKVILDPKA

SEQ ID NO: 12569 - protein, 142 aa, Glycine max
MVLESTMICIDNSEWMRNGDYSPSRFQAQADAVNLICGAKTQSNPENTVGVMTMAGKGVRVLVTPTSDLGKILACMHGLEVGAEANLAAAIQVAQLALKHRQNKRQQQRIIVFIGSPVTYDKKVLETIGKKLKKNNVALDVV

SEQ ID NO: 12570 - protein, 352 aa, Triticum aestivum
  unsure (1)..(352): unsure at all Xaa locations
MAASKQWTRVRTLGRGASGAEVFLAADDASGELFAVKSATAACASALKREEGLMACLHSPCVVSCLGGRSARDGSYHLFLEFAPGGSLADRVASNGGLDERAVRGYAADVAAGLAYLHGAGMVHGDVKARNVVIGADGRAKLADFGCSRKAGADVPIIGGTPAFMAPEVARGEEQGPAADVWALGCTVVEMXTGRAPWSGMDGHALAALHRIGYTEAVPELPQWLSAEARDFLGGCLVRQASDRCTAAQLLEHPFLASAGGHAKPKATESSWCRPRHPEGGFWESESKPGRGSTKPGPKRNKALAXPASGLPEVDPKGGWMGLLSGPTGAPKQGPVRPRSHRIYAGEVFKGK

SEQ ID NO: 12571 - protein, 229 aa, Triticum aestivum
  unsure (1)..(229): unsure at all Xaa locations
MGTMAPSPALLPVLLLLPLLLLSVVCTAGAAPAATATVPTIPSQPGKPNSNNKQKQGGAPLGPAVRALVQSTCNATTYYDLCVAALVADPASSTADLRGLCAIAVSAAAANASATASALANTTWAASGAPEPGSDGRAQQVPALLTRTCAGKYGEAREALLEARESVGEEAYDYAFVHVGAAAEYPAVCRTMFRRKRVPYPVELAGGRRRWRPLNRXIDSHAPAYLYKD

SEQ ID NO: 12572 - protein, 296 aa, Escherichia coli O157:H7 EDL933
MSFDLIIKNGTVILENEARVVDIAVKGGKIAAIGQDLGDAKEVMDASGLVVSPGMVDAHTHISEPGRSHWEGYETGTRAAAKGGITTMIEMPLNQLPATVDRASIELKFDAAKGKLTIDAAQLGGLVSYNIDRLHELDEVGVVGFKCFVATCGDRGIDNDFRDVNDWQFFKGAQKLGELGQPVLVHCENALICDALGEEAKREGRVTAHDYVASRPVFTEVEAIRRVLYLAKVAGCRLHVCHISSPEGVEEVTRARQEGQDVTCESCPHYFVLDTDQFEEIGTLAKCSPPIRDLEN

SEQ ID NO: 12573 - protein, 302 aa, Zea mays
MAGMSLQHPWAFAFGLLGNVISFMTFLAPIPTFYRIYKSKSTEGFQSVPYVVALFSAMLWIFYALIKSNETFLITINAAGCVIETIYVVMYFVYAPKKAKLFTAKIMVLLNGGVFGVILLLTLLLFKGSKRVVLLGWICVGFSVSVFVAPLSIMRRVIQTKSVEYMPFSLSLSLTLSAVVWFLYGLLIKDKYVALPNILGFTFGVVQMVLYVLYMNKTPVAATAEGKDAGKLSSAADEHVLVNIAKLSPALPERSSGVHPVTQMAGVPVRSCAAEATAPAMLPNRDVVDVFVSRHSPAVHVA

SEQ ID NO: 12574 - protein, 103 aa, Zea mays
MHGRTAMAVACLLCMTALLLVQDVQSRRLLWTEQEKKQTHGGLVGNHGAADRRSTSLEPCSGAMGGGGTGSADKQGEFPCDDDTSKWTELHTDYIYTQDFKHP

SEQ ID NO: 12575 - protein, 485 aa, Agrobacterium tumefaciens str. C58
MQNKVQFITYVDRLTRGGFRQLKELVDGKFAGLFGGVHVLPFFNPIDGADAGFDPTDHTIVDPRLGDWEDVRALSGSVEIMADLIVNHVSSQSGAFTDFIAKGSASEFADMFMTFDKVFPDGATEEDLLRIYRPRPGLPFSKVTLADGTQRMLWTTFTPEQIDIDVHSAKGTTYLETILDRFSEANVTAIRLDAAGYAIKKAGSSCFMIDDTYAFLEEVAGKARNRGMEVLVEIHSYHRDQIEIAKKVDRVYDFALPPLILHALFTGDATPLAKWLAISPRNAITVLDTHDGIGVIDVGAHSDGRAGLLEPQAIDNLVGEIHRRSDGQSRQATGAAASNLDLYQVNCTYYDALGRNDNDYLIARAIQFFAPGIPQVYYVGLLGGVNDMDLLAKTGVGRDINRHYYGNDEIGTALETPLFHRLSNLIRFRNTHPAFGGALKATIADAGALVLSWQHGDAFAELKISFADRKASIAASGQSEMQIVE

SEQ ID NO: 12576 - protein, 291 aa, Glycine max
  unsure (1)..(291): unsure at all Xaa locations
FSCWKAGKVQSIFFFWESKEVCNREDXRKLLPPDHVIRACQDLASKEYXEEVYAAYDKHKLETWDFPKATKFTGIEMXEEEAVXEQQRMXAEARARMNNGAAKPKEPAXXPQNQPQQXPPQLHLQVHLKAQQPPQPQPQLHHPQSQQPLHPQLQPYTQAPPQQPLHPQLQPYTQAPPQQPLQPPLQLYPQAQPEQPLQPQSSGSTTGTCVISTAAPSATGTXLLLQPPPQQSPQSQLQLHQQPQPMQVPLPPLPQPQPQPPELQQPQPLTQLQAEHGLNWTVSGSEHVASL

SEQ ID NO: 12577 - protein, 308 aa, Zea mays
PRASWPEVTPMTSLAAADLALQAGIPAGALNVVMGNAPEIGDALLQSTQVRKITFTGSTAVGKKLMAESANTVKKVSLELGGNAPCIVFDDADIDVAVKGSLAAKFRNSGQTCVCANRILVQEGIYEKFASAFIKAVQSLKVGNGLEESTSQGPLINEAAVQKVEKFINDATSKGANVMLGGKRHSLGMSFYEPTVVGNVSNDMLLFREEVFGPVAPLIPFKTEEEAVHMANDTNAGLAAYIFTKSIPRSWRVSESLEYGLVGVNEGIISTEVAPFGGVKQSGLGREGSKYGVDEYLELKYICMGNLG

SEQ ID NO: 12578 - protein, 136 aa, Arabidopsis thaliana
MASSMLSSATMVASPAQATMVAPFNGLKSSAAFPATRKANNDITSITSNGGRVNCMQVWPPIGKKKFETLSYLPDLTDSELAKEVDYLIRNKWIPCVEFDTDLCTVSTVTHPDTMMDGTGQCGSFPCSVAPTPLKC

SEQ ID NO: 12579 - protein, 402 aa, Oryza sativa
MVLEATMICIDNSEWMRNGDYSPSRFQAQADAVNLICGAKTQSNPENTVGVMTMAGKGVRVLVTPTSDLGKILACMHGLEVGAEANLAAAIQVAQLALKHRQNKRQQQRIIAFIGSPVKYDKKVLETIGKKLKKNNVALDIVDFGETDDDKPEKLEALISAVNSSDSSHIVHVPPGENALSDVLISTPIFTGEEGGSGFAASAAAAAATGAAGFEFDVDPNVDPELALALRLSMEEERARQEAIAKKAAEESSGAENKDHASSSNADSVMAEAEPASNAADDKKDQPKEDDDAQLLQQALAMSMEEGSSGAAAADAAMAEAAVDDQDLALALQMSVQDAGGSSQSDMSKVFEDRSFVTSILNSLPGVDPNDPSVKDLLASLHGQGEQEKKEDKSDKPEDEKK

SEQ ID NO: 12580 - protein, 408 aa, Shewanella oneidensis MR-1
MTVSELRFALDTFYFLISGALVMWMAAGFAMLEAGLVRSKNTTEILTKNVVLYAIACVMYLLVGYNIMYVDNAEGGWLPSFGTLIGSQAADANHALESDFFFQVVFVATAMSIVSGAVAERMKLWAFLVFSVVMTGIIYPVEGYWTWGKGFIASLGFVDFAGSGIVHMTGAAAAIAGVLLLGARKGKYGPNGQVNPIPGSNLPMATLGMFILWMGWFGFNGGSQLMVSDAANASAVAKVFVNTNTAAALGAISALIVCKMIWGKADLTMILNGILAGLVAITADPLSPSLLMAGVIGLVAGGLVVFSIVGLDRIKIDDPVGAISVHGVAGFLGLMCVPLSNANATITAQLTGAAIIFAWVFSASFAVWFVLKMTMGIRVSEEEEYNGMDASDCGIDAYPEFVTVKSAG

SEQ ID NO: 12581 - DNA, 844 bp, Oryza sativa
ctcgaggtcattcatatgcttgagaagagagtcgggatagtccaaaataaaacaaaggtaagattacctggtcaaaagtgaaaacatcagttaaaaggtggtataaagtaaaatatcggtaataaaaggtggcccaaagtgaaatttactcttttctactattataaaaattgaggatgtttttgtcggtactttgatacgtcatttttgtatgaattggtttttaagtttattcgcttttggaaatgcatatctgtatttgagtcgggttttaagttcgtttgcttttgtaaatacagagggatttgtataagaaatatctttaaaaaaacccatatgctaatttgacataatttttgagaaaaatatatattcaggcgaattctcacaatgaacaataataagattaaaatagctttcccccgttgcagcgcatgggtattttttctagtaaaaataaaagataaacttagactcaaaacatttacaaaaacaacccctaaagttcctaaagcccaaagtgctatccacgatccatagcaagcccagcccaacccaacccaacccaacccaccccagtccagccaactggacaatagtctccacacccccccactatcaccgtgagttgtccgcacgcaccgcacgtctcgcagccaaaaaaaaaaaaagaaagaaaaaaaagaaaaagaaaaaacagcaggtgggtccgggtcgtgggggccggaaacgcgaggaggatcgcgagccagcgacgaggccggccctccctccgcttccaaagaaacgccccccatcgccactatatacatacccccccctctcctcccatccccccaaccct

SEQ ID NO: 12582 - DNA, 838 bp, Hordeum vulgare
catcgattttaaaaaaaagttcatacctttcaaaaacgttcatcaatttttttaaaaagttcactaaaaatgaaaaaaagttcatccaatttaaaaaaagttcattaattttttataaatttcaataaatttgaaaaaacttcataaaattcaacaaaagttcattgaagtgaaaaaagctcataaatctttaaaaagtgcatccattttcaaaaagatgttcatcaaaattcaatatagttcaccaatattcaaaaaagttcattaatcttaaaaaatattcgctaaaatttaaaaaatgtttatcaatatttaaacggcgtctagatgagccggtctatttacaaacaccataggcgccaattaacaaaaatgcacgttagatcacgtctacggcgtcaaataggaaatgcccatcggccttactattaagagttgttttggttatcctttaggatttatgctgtgggctggacttaacacaaaacccacagccatggtaggccggaatctattattcagctcacaaacgatgttctactcaaaagaagaaaaaaatctgttgtcagaaaaagagaacaaaaaaggctcacgaacatgccgcggctcgcacaggtggccgtgagcttctgaatgacttggccacccggcatgtccactgcccccctagacggtgtgggtgggtggacaggtcaagcgcattgaacaaggtcaccctgcgttctgccacgaggccaactgcgtggccctcatgcaacgcgccttgctgccacttctacacacgccctcgccggccgaccgctgctataaaagcagctccccgttgcgtcctcgacgg

SEQ ID NO: 12583 - DNA, 828 bp, Glycine max
ggcaaaaacatttaatacgtattatttaagaaaaaaatatgtaataatatatttatattttaatatctattcttatgtattttttaaaaatctattatatattgatcaactaaaatatttttatatctacacttattttgcatttttatcaattttcttgcgttttttggcatatttaataatgactattctttaataatcaatcattattcttacatggtacatattgttggaaccatatgaagtgtccattgcatttgactatgtggatagtgttttgatccaggcctccatttgccgcttattaattaatttggtaacagtccgtactaatcagttacttatccttcctccatcataattaatcttggtagtctcgaatgccacaacactgactagtctcttggatcataagaaaaagccaaggaacaaaagaagacaaaacacaatgagagtatcctttgcatagcaatgtctaagttcataaaattcaaacaaaaacgcaatcacacacagtggacatcacttatccactagctgatcaggatcgccgcgtcaagaaaaaaaaactggaccccaaaagccatgcacaacaacacgtactcacaaaggtgtcaatcgagcagcccaaaacattcaccaactcaacccatcatgagcccacacatttgttgtttctaacccaacctcaaactcgtattctcttccgccacctcatttttgtttatttcaacacccgtcaaactgcatgccaccccgtggccaaatgtccatgcatgttaacaagacctatgactataaatatctgcaatctcggcccaggttttc

SEQ ID NO: 12584 - DNA, 523 bp, Zea mays
atcggaatattagcatgtcaacttgcactctctaaggctcctttggaaagcaggattttagaaaaaaaaatcatataaattttttacatgaatcagtttattttcggattatgaaatattttctcataacagtataacacatattttgtatataagttattatgttattatatataaccgttgcaacgtacgggcattcacctagtaaagaaagaagattaattattctctggtggagattgtgcccgagcccgaaggtcatgatatggacgttgcaaacccacttcacgaggggacaaaaaagaaatagggttaccactttcatcagttaaagggcgtgacatggacgtgttgaagatccggcacattccctgcgaaatatacacgtcatggtactaacgaggcatgaaactggccacatggccatggacgcgtgaagcgtgccatgcattggacatgcggcatccgaacttctgaagatcatatcagagagacactgatgtacgaactgccgtaacattct

SEQ ID NO: 12585 - DNA, 786 bp, Zea mays
gacatggaggtggaaggcctgacgtagatagagaagatgctcttagctttcattgtctttcttttgtagtcatctgatttacctctctcgtttatacaactggttttttaaacactccttaacttttcaaattgtctctttctttaccctagactagataattttaatggtgattttgctaatgtggcgccatgttagatagaggtaaaatgaactagttaaaagctcagagtgataaatcaggctctcaaaaattcataaactgttttttaaatatccaaatatttttacatggaaaataataaaatttagtttagtattaaaaaattcagttgaatatagttttgtcttcaaaaattatgaaactgatcttaattatttttccttaaaaccgtgctctatctttgatgtctagtttgagacgattatataattttttttgtgcttaactacgacgagctgaagtacgtagaaatactagtggagtcgtgccgcgtgtgcctgtagccactcgtacgctacagcccaagcgctagagcccaagaggccggaggtggaaggcgtcgcggcactatagccactcgccgcaagagcccaagagaccggagctggaaggatgagggtctgggtgttcacgaattgcctggaggcaggaggctcgtcgtccggagccacaggcgtggagacgtccgggataaggtgagcagccgctgcgataggggcgcgtgtgaaccccgtcgcgccccacggatggtataagaataaaggcattccgcgtgcaggatc

SEQ ID NO: 12586 - DNA, 1832 bp, Oryza sativa
cctctgttttgtttttcaccctcaatatttggaaacatttatctaggttgtttgtgtccaggcctataaatcatacatgatgttgtcgtattggatgtgaatgtggtggcgtgttcagtgccttggatttgagtttgatgagagttgcttctgggtcaccactcaccattatcgatgctcctcttcagcataaggtaaaagtcttccctgtttacgttattttacccactatggttgcttgggttggttttttcctgattgcttatgccatggaaagtcatttgatatgttgaacttgaattaactgtagaattgtatacatgttccatttgtgttgtacttccttcttttctattagtagcctcagatgagtgtgaaaaaaacagattatataacttgccctataaatcatttgaaaaaaatattgtacagtgagaaattgatatatagtgaatttttaagagcatgttttcctaaagaagtatatattttctatgtacaaaggccattgaagtaattgtagatacaggataatgtagactttttggacttacactgctacctttaagtaacaatcatgagcaatagtgttgcaatgatatttaggctgcattcgtttactctcttgatttccatgagcacgcttcccaaactgttaaactctgtgttttttgccaaaaaaaaatgtataggaaagttgcttttaaaaaatcatatcaatccattttttaagttatagctaatacttaattaatcatgcgctaataagtcactctgtttttcgtactagagagattgttttgaaccagcactcaagaacacagccttaacccagccaaataatgctacaacctaccagtccacacctcttgtaaagcatttgttgcatggaaaagctaagatgacagcaacctgttcaggaaaacaactgacaaggtcatagggagagggagcttttggaaaggtgccgtgcagttcaaacaattagttagcagtagggtgttggtttttgctcacagcaataagaagttaatcatggtgtaggcaacccaaataaaacaccaaaatatgcacaaggcagtttgttgtattctgtagtacagacaaaactaaaagtaatgaaagaagatgtggtgttagaaaaggaaacaatatcatgagtaatgtgtgagcattatgggaccacgaaataaaaagaacattttgatgagtcgtgtatcctcgatgagcctcaaaagttctctcaccccggataagaaacccttaagcaatgtgcaaagtttgcattctccactgacataatgcaaaataagatatcatcgatgacatagcaactcatgcatcatatcatgcctctctcaacctattcattcctactcatctacataagtatcttcagctaaatgttagaacataaacccataagtcacgtttgatgagtattaggcgtgacacatgacaaatcacagactcaagcaagataaagcaaaatgatgtgtacataaaactccagagctatatgtcatattgcaaaaagaggagagcttataagacaaggcatgactcacaaaaattcatttgcctttcgtgtcaaaaagaggagggctttacattatccatgtcatattgcaaaagaaagagagaaagaacaacacaatgctgcgtcaattatacatatctgtatgtccatcattattcatccacctttcgtgtaccacacttcatatatcatgagtcacttcatgtctggacattaacaaactctatcttaacatttagatgcaagagcctttatctcactataaatgcacgatgatttctcattgtttctc

SEQ ID NO: 12587 - DNA, 786 bp, Zea mays
gacatggaggtggaaggcctgacgtagatagagaagatgctcttagctttcattgtctttcttttgtagtcatctgatttacctctctcgtttatacaactggttttttaaacactccttaacttttcaaattgtctctttctttaccctagactagataattttaatggtgattttgctaatgtggcgccatgttagatagaggtaaaatgaactagttaaaagctcagagtgataaatcaggctctcaaaaattcataaactgttttttaaatatccaaatatttttacatggaaaataataaaatttagtttagtattaaaaaattcagttgaatatagttttgtcttcaaaaattatgaaactgatcttaattatttttccttaaaaccgtgctctatctttgatgtctagtttgagacgattatataattttttttgtgcttaactacgacgagctgaagtacgtagaaatactagtggagtcgtgccgcgtgtgcctgtagccactcgtacgctacagcccaagcgctagagcccaagaggccggaggtggaaggcgtcgcggcactatagccactcgccgcaagagcccaagagaccggagctggaaggatgagggtctgggtgttcacgaattgcctggaggcaggaggctcgtcgtccggagccacaggcgtggagacgtccgggataaggtgagcagccgctgcgataggggcgcgtgtgaaccccgtcgcgccccacggatggtataagaataaaggcattccgcgtgcaggatt

SEQ ID NO: 12588 - DNA, 165 bp, Zea mays
cacccgttcgcctctcaccttttcgctgtactcactcgccacacacaccccctctccagctccgttggagctccggacagcagcaggcgcggggcggtcacgtagtaagcagctctcggctccctctccccttgctccatatgatcgtcgaacccatcgagctac

SEQ ID NO: 12589 - DNA, 1039 bp, Zea mays
gtcccgcgtcaatattattaaaaaactcctacatttctttataatcaacccgcactcttataatctcttctctactactataataagagagtttatgtacaaaataaggtgaaattatgtataagtgttctggatattggttgttggctccatattcacacaacctaatcaatagaaaacatatgttttattaaaacaaaatttatcatatatcatatatatatatatacatatatatatatatatataaaccgtagcaatgcacgggcatataactagtgcaacttaatacatgtgtgtattaagatgaataagagggtatccaaataaaaaacttgttcgcttacgtctggatcgaaaggggttggaaacgattaaatctcttcctagtcaaaattgaatagaaggagatttaatctctcccaatccccttcgatcatccaggtgcaaccgtataagtcctaaagtggtgaggaacacgaaacaaccatgcattggcatgtaaagctccaagaatttgttgtatccttaacaactcacagaacatcaaccaaaattgcacgtcaagggtattgggtaagaaacaatcaaacaaatcctctctgtgtgcaaagaaacacggtgagtcatgccgagatcatactcatctgatatacatgcttacagctcacaagacattacaaacaactcatattgcattacaaagatcgtttcatgaaaaataaaataggccggacaggacaaaaatccttgacgtgtaaagtaaatttacaacaaaaaaaaagccatatgtcaagctaaatctaattcgttttacgtagatcaacaacctgtagaaggcaacaaaactgagccacgcagaagtacagaatgattccagatgaaccatcgacgtgctacgtaaagagagtgacgagtcatatacatttggcaagaaaccatgaagctgcctacagccgtctcggtggcataagaacacaagaaattgtgttaattaatcaaagctataaataacgctcgcatgcctgtgcacttctcc

SEQ ID NO: 12590 - DNA, 613 bp, Cauliflower mosaic virus
ggtccgatgtgagacttttcaacaaagggtaatatccggaaacctcctcggattccattgcccagctatctgtcactttattgtgaagatagtggaaaaggaaggtggctcctacaaatgccatcattgcgataaaggaaaggccatcgttgaagatgcctctgccgacagtggtcccaaagatggacccccacccacgaggagcatcgtggaaaaagaagacgttccaaccacgtcttcaaagcaagtggattgatgtgatggtccgattgagacttttcaacaaagggtaatatccggaaacctcctcggattccattgcccagctatctgtcactttattgtgaagatagtggaaaaggaaggtggctcctacaaatgccatcattgcgataaaggaaaggccatcgttgaagatgcctctgccgacagtggtcccaaagatggacccccacccacgaggagcatcgtggaaaaagaagacgttccaaccacgtcttcaaagcaagtggattgatgtgatatctccactgacgtaagggatgacgcacaatcccactatccttcgcaagacccttcctctatataaggaagttcatttcatttggagagg

SEQ ID NO: 12591 - DNA, 469 bp, Zea mays
ggtactcctgagatactataccctcctgttttaaaatagttggcattatcgaattatcattttactttttaatgttttctcttcttttaatatattttatgaattttaatgtattttaaaatgttatgcagttcgctctggacttttctgctgcgcctacacttgggtgtactgggcctaaattcagcctgaccgaccgcctgcattgaataatggatgagcaccggtaaaatccgcgtacccaactttcgagaagaaccgagacgtggcgggccgggccaccgacgcacggcaccagcgactgcacacgtcccgccggcgtacgtgtacgtgctgttccctcactggccgcccaatccactcatgcatgcccacgtacacccctgccgtggcgcgcccagatcctaatcctttcgccgttctgcacttctgctgcctataaatggcggcatcgaccgtcacctgcttc

SEQ ID NO: 12592 - DNA, 80 bp, Oryza sativa
accaccaccaccaccaccacctccacctcctcccccctcgctgccggacgacgagctcctcccccctccccctccgccgc

SEQ ID NO: 12593 - DNA, 65 bp, Hordeum vulgare subsp. vulgare
catccatcgagagacgttcgcagcagcaaagagcacgcagcaactagctttcagttgtttcaacc

SEQ ID NO: 12594 - DNA, 13 bp, Glycine max
atcatcaagaacc

SEQ ID NO: 12595 - DNA, 151 bp, Zea mays
attctatatataccctcagtccctgttccagttctcgttaagctagcagcaccaagttgtcgaacacttgcctgctcttgagctcgatcaagctatcatcagctgcgtcttgcgcacagcaacagcttcccaactgcaaccgtagcagcca

SEQ ID NO: 12596 - DNA, 477 bp, Oryza sativa
cgccgcgccggtaaccaccccgcccctctcctctttctttctccgttttttttttccgtctcggtctcgatctttggccttggtagtttgggtgggcgagaggcggcttcgtgcgcgcccagatcggtgcgcgggaggggcgggatctcgcggctggggctctcgccggcgtggatccggcccggatctcgcggggaatggggctctcggatgtagatctgcgatccgccgttgttgggggagatgatggggggtttaaaatttccgccatgctaaacaagatcaggaagaggggaaaagggcactatggtttatatttttatatatttctgctgcttcgtcaggcttagatgtgctagatctttctttcttctttttgtgggtagaatttgaatccctcagcattgttcatcggtagtttttcttttcatgatttgtgacaaatgcagcctcgtgcggagcttttttgtaggtaga

SEQ ID NO: 12597 - DNA, 804 bp, Zea mays
accgtcttcggtacgcgctcactccgccctctgcctttgttactgccacgtttctctgaatgctctcttgtgtggtgattgctgagagtggtttagctggatctagaattacactctgaaatcgtgttctgcctgtgctgattacttgccgtcctttgtagcagcaaaatatagggacatggtagtacgaaacgaagatagaacctacacagcaatacgagaaatgtgtaatttggtgcttagcggtatttatttaagcacatgttggtgttatagggcacttggattcagaagtttgctgttaatttaggcacaggcttcatactacatgggtcaatagtatagggattcatattataggcgatactataataatttgttcgtctgcagagcttattatttgccaaaattagatattcctattctgtttttgtttgtgtgctgttaaattgttaacgcctgaaggaataaatataaatgacgaaattttgatgtttatctctgctcctttattgtgaccataagtcaagatcagatgcacttgttttaaatattgttgtctgaagaaataagtactgacagtattttgatgcattgatctgcttgtttgttgtaacaaaatttaaaaataaagagtttcctttttgttgctctccttacctcctgatggtatctagtatctaccaactgacactatattgcttctctttacatacgtatcttgctcgatgccttctccctagtgttgaccagtgttactcacatagtctttgctcatttcattgtaatgcagataccaagcgg

SEQ ID NO: 12598 - DNA, 943 bp, Solanum tuberosum
accctgcaatgtgaccctagacttgtccatcttctggattggccaacttaattaatgtatgaaataaaaggatgcacacatagtgacatgctaatcactataatgtgggcatcaaagttgtgtgttatgtgtaattactaattatctgaataagagaaagagatcatccatatttcttatcctaaatgaatgtcacgtgtctttataattctttgatgaaccagatgcattttattaaccaattccatatacatataaatattaatcatatataattaatatcaattgggttagcaaaacaaatctagtctaggtgtgttttgctaattattgggggatagtgcaaaaagaaatctacgttctcaataattcagatagaaaacttaataaagtgagataatttacatagattgcttttatcctttgatatatgtgaaaccatgcatgatataaggaaaatagatagagaaataattttttacatcgttgaatatgtaaacaatttaattcaagaagctaggaatataaatattgaggagtttatgattattattattattttgatgttcaatgaagttttttttaatttcatatgaagtatacaaaaattcttcatagatttttgtttctatgccgtagttatctttaatatatttgtggttgaagaaatttattgctagaaacgaatggattgtcaatttttttttaaagcaaatatatatgaaattatactgtatattattttagtcatgattaaaatgtggccttaattgaatcatctttctcattcattttttcaaaagcatatcaggatgattgatatttatctattttaaaaattaatttaagggttcaaattaaatttaacttaaaagtgtcctaaccgtagttaaaggtttactttaaaaaaatactatgaaaaatctaatcttctatgaatcga

SEQ ID NO: 12599 - DNA, 315 bp, Gossypium hirsutum
tgatcacctgtcgtacagtatttctacatttgatgtgtgatttgtgaagaacatcaaacaaaacaagcactggctttaatatgatgataagtattatggtaattaattaattggcaaaaacaacaatgaagctaaaattttatttattgagccttgcggttaatttcttgtgatgatctttttttttattttctaattatatatagtttcctttgctttgaaatgctaaaggtttgagagagttatgctctttttttcttcctctttcttttttaactttatcatacaaattttgaataaaaatgtgagtacatt

SEQ ID NO: 12600 - DNA, 940 bp, Solanum tuberosum
accctgcaatgtgaccctagacttgtccatcttcggatggccaacttaattaatgtataaataaaaggatgcacacatagtgacatgctaatcactataatgtgggcatcaaagttgtgtgttatgtgtaattactaattatctgaataagagaaagagatcatccatatttcttatcctaaatgaatgtcacgtgtctttataattctttgatgaaccagatgcattttattaaccaattccatatacatataaatattaatcatatataattaatatcaattgggttagcaaaacaaatctagtctaggtgtgttttgctaattattgggggatagtgcaaaaagaaatctacgttctcaataattcagatagaaaacttaataaagtgagataatttacatagattgcttttatcctttgatatatgtgaaaccatgcatgatataaggaaaatagatagagaaataattttttacatcgttgaatatgtaaacaatttaattcaagaagctaggaatataaatattgaggagtttatgattattattattattttgatgttcaatgaagttttttttaatttcatatgaagtatacaaaaattcttcatagatttttgtttctatgccgtagttatctttaatatatttgtggttgaagaaatttattgctagaaacgaatggattgtcaatttttttttaaagcaaatatatatgaaattatactgtatattattttagtcatgattaaaatgtggccttaattgaatcatctttctcattcattttttcaaaagcatatcaggatgattgatatttatctattttaaaaattaatttaagggttcaaattaaatttaacttaaaagtgtcctaaccgtagttaaaggtttactttaaaaaaatactatgaaaaatctaatcttctatgaatcga

SEQ ID NO: 12601 - DNA, 61 bp, Zea mays
atcaccaccactgggtcttcagaccattagctttatctactccagagcgcagaagaacccg

SEQ ID NO: 12602 - DNA, 228 bp, Arabidopsis thaliana
atggcgcaagttagcagaatctgcaatggtgtgcagaacccatctcttatctccaatctctcgaaatccagtcaacgcaaatctcccttatcggtttctctgaagacgcagcagcatccacgagcttatccgatttcgtcgtcgtggggattgaagaagagtgggatgacgttaattggctctgagcttcgtcctcttaaggtcatgtcttctgtttccacggcgtgc

SEQ ID NO: 12603 - DNA, 10289 bp, Artificial Sequence
  synthetic Sequence
cgcgccttaattaagcggccgcatcgatcgtgaagtttctcatctaagcccccatttggacgtgaatgtagacacgtcgaaataaagatttccgaattagaataatttgtttattgctttcgcctataaatacgacggatcgtaatttgtcgttttatcaaaatgtactttcattttataataacgctgcggacatctacatttttgaattgaaaaaaaattggtaattactctttctttttctccatattgaccatcatactcattgctgatccatgtagatttcccggacatgaagccatttacaattgaatatatcctgccgccgctgccgctttgcacccggtggagcttgcatgttggtttctacgcagaactgagccggttaggcagataatttccattgagaactgagccatgtgcaccttccccccaacacggtgagcgacggggcaacggagtgatccacatgggacttttcctagcttggctgccatttttggggtgaggccgttcgcggccgaggggcgcagcccctggggggatgggaggcccgcgttagcgggccgggagggttcgagaagggggggcaccccccttcggcgtgcgcggtcacgcgcacagggcgcagccctggttaaaaacaaggtttataaatattggtttaaaagcaggttaaaagacaggttagcggtggccgaaaaacgggcggaaacccttgcaaatgctggattttctgcctgtggacagcccctcaaatgtcaataggtgcgcccctcatctgtcagcactctgcccctcaagtgtcaaggatcgcgcccctcatctgtcagtagtcgcgcccctcaagtgtcaataccgcagggcacttatccccaggcttgtccacatcatctgtgggaaactcgcgtaaaatcaggcgttttcgccgatttgcgaggctggccagctccacgtcgccggccgaaatcgagcctgcccctcatctgtcaacgccgcgccgggtgagtcggcccctcaagtgtcaacgtccgcccctcatctgtcagtgagggccaagttttccgcgaggtatccacaacgccggcggccggccgcggtgtctcgcacacggcttcgacggcgtttctggcgcgtttgcagggccatagacggccgccagcccagcggcgagggcaaccagcccggtgagcgtcggaaagggtcgatcgaccgatgcccttgagagccttcaacccagtcagctccttccggtgggcgcggggcatgactatcgtcgccgcacttatgactgtcttctttatcatgcaactcgtaggacaggtgccggcagcgctctgggtcattttcggcgaggaccgctttcgctggagcgcgacgatgatcggcctgtcgcttgcggtattcggaatcttgcacgccctcgctcaagccttcgtcactggtcccgccaccaaacgtttcggcgagaagcaggccattatcgccggcatggcggccgacgcgctgggctacgtcttgctggcgttcgcgacgcgaggctggatggccttccccattatgattcttctcgcttccggcggcatcgggatgcccgcgttgcaggccatgctgtccaggcaggtagatgacgaccatcagggacagcttcaaggatcgctcgcggctcttaccagcctaacttcgatcattggaccgctgatcgtcacggcgatttatgccgcctcggcgagcacatggaacgggttggcatggattgtaggcgccgccctataccttgtctgcctccccgcgttgcgtcgcggtgcatggagccgggccacctcgacctgaatggaagccggcggcacctcgctaacggattcaccactccaagaattggagccaatcaattcttgcggagaactgtgaatgcgcaaaccaacccttggcagaacatatccatcgcgtccgccatctccagcagccgcacgcggcgcatctcgggcagcgttgggtcctggccacgggtgcgcatgatcgtgctcctgtcgttgaggacccggctaggctggcggggttgccttactggttagcagaatgaatcaccgatacgcgagcgaacgtgaagcgactgctgctgcaaaacgtctgcgacctgagcaacaacatgaatggtcttcggtttccgtgtttcgtaaagtctggaaacgcggaagtcagcgccctgcaccattatgttccggatctgcatcgcaggatgctgctggctaccctgtggaacacctacatctgtattaacgaagcgctggcattgaccctgagtgatttttctctggtcccgccgcatccataccgccagttgtttaccctcacaacgttccagtaaccgggcatgttcatcatcagtaacccgtatcgtgagcatcctctctcgtttcatcggtatcattacccccatgaacagaaatcccccttacacggaggcatcagtgaccaaacaggaaaaaaccgcccttaacatggcccgctttatcagaagccagacattaacgcttctggagaaactcaacgagctggacgcggatgaacaggcagacatctgtgaatcgcttcacgaccacgctgatgagctttaccgcagctgcctcgcgcgtttcggtgatgacggtgaaaacctctgacacatgcagctcccggagacggtcacagcttgtctgtaagcggatgccgggagcagacaagcccgtcagggcgcgtcagcgggtgttggcgggtgtcggggcgcagccatgacccagtcacgtagcgatagcggagtgtatactggcttaactatgcggcatcagagcagattgtactgagagtgcaccatatgcggtgtgaaataccgcacagatgcgtaaggagaaaataccgcatcaggcgctcttccgcttcctcgctcactgactcgctgcgctcggtcgttcggctgcggcgagcggtatcagctcactcaaaggcggtaatacggttatccacagaatcaggggataacgcaggaaagaacatgtgagcaaaaggccagcaaaaggccaggaaccgtaaaaaggccgcgttgctggcgtttttccataggctccgcccccctgacgagcatcacaaaaatcgacgctcaagtcagaggtggcgaaacccgacaggactataaagataccaggcgtttccccctggaagctccctcgtgcgctctcctgttccgaccctgccgcttaccggatacctgtccgcctttctcccttcgggaagcgtggcgctttctcatagctcacgctgtaggtatctcagttcggtgtaggtcgttcgctccaagctgggctgtgtgcacgaaccccccgttcagcccgaccgctgcgccttatccggtaactatcgtcttgagtccaacccggtaagacacgacttatcgccactggcagcagccactggtaacaggattagcagagcgaggtatgtaggcggtgctacagagttcttgaagtggtggcctaactacggctacactagaaggacagtatttggtatctgcgctctgctgaagccagttaccttcggaaaaagagttggtagctcttgatccggcaaacaaaccaccgctggtagcggtggtttttttgtttgcaagcagcagattacgcgcagaaaaaaaggatctcaagaagatcctttgatcttttctacggggtctgacgctcagtggaacgaaaactcacgttaagggattttggtcatgagattatcaaaaaggatcttcacctagatccttttaaattaaaaatgaagttttaaatcaatctaaagtatatatgagtaaacttggtctgacagttaccaatgcttaatcagtgaggcacctatctcagcgatctgtctatttcgttcatccatagttgcctgactccccgtcgtgtagataactacgatacgggagggcttaccatctggccccagtgctgcaatgataccgcgagacccacgctcaccggctccagatttatcagcaataaaccagccagccggaagggccgagcgcagaagtggtcctgcaactttatccgcctccatccagtctattaattgttgccgggaagctagagtaagtagttcgccagttaatagtttgcgcaacgttgttgccattgctgcaggtcgggagcacaggatgacgcctaacaattcattcaagccgacaccgcttcgcggcgcggcttaattcaggagttaaacatcatgagggaagcggtgatcgccgaagtatcgactcaactatcagaggtagttggcgtcatcgagcgccatctcgaaccgacgttgctggccgtacatttgtacggctccgcagtggatggcggcctgaagccacacagtgatattgatttgctggttacggtgaccgtaaggcttgatgaaacaacgcggcgagctttgatcaacgaccttttggaaacttcggcttcccctggagagagcgagattctccgcgctgtagaagtcaccattgttgtgcacgacgacatcattccgtggcgttatccagctaagcgcgaactgcaatttggagaatggcagcgcaatgacattcttgcaggtatcttcgagccagccacgatcgacattgatctggctatcttgctgacaaaagcaagagaacatagcgttgccttggtaggtccagcggcggaggaactctttgatccggttcctgaacaggatctatttgaggcgctaaatgaaaccttaacgctatggaactcgccgcccgactgggctggcgatgagcgaaatgtagtgcttacgttgtcccgcatttggtacagcgcagtaaccggcaaaatcgcgccgaaggatgtcgctgccgactgggcaatggagcgcctgccggcccagtatcagcccgtcatacttgaagctaggcaggcttatcttggacaagaagatcgcttggcctcgcgcgcagatcagttggaagaatttgttcactacgtgaaaggcgagatcaccaaggtagtcggcaaataatgtctaacaattcgttcaagccgacgccgcttcgcggcgcggcttaactcaagcgttagatgctgcaggcatcgtggtgtcacgctcgtcgtttggtatggcttcattcagctccggttcccaacgatcaaggcgagttacatgatcccccatgttgtgcaaaaaagcggttagctccttcggtcctccgatcgaggatttttcggcgctgcgctacgtccgcgaccgcgttgagggatcaagccacagcagcccactcgaccttctagccgacccagacgagccaagggatctttttggaatgctgctccgtcgtcaggctttccgacgtttgggtggttgaacagaagtcattatcgcacggaatgccaagcactcccgaggggaaccctgtggttggcatgcacatacaaatggacgaacggataaaccttttcacgcccttttaaatatccgattattctaataaacgctcttttctcttaggtttacccgccaatatatcctgtcaaacactgatagtttaaactgaaggcgggaaacgacaatctggcgcgcctgcggccgcctcgaggtcattcatatgcttgagaagagagtcgggatagtccaaaataaaacaaaggtaagattacctggtcaaaagtgaaaacatcagttaaaaggtggtataaagtaaaatatcggtaataaaaggtggcccaaagtgaaatttactcttttctactattataaaaattgaggatgtttttgtcggtactttgatacgtcatttttgtatgaattggtttttaagtttattcgcttttggaaatgcatatctgtatttgagtcgggttttaagttcgtttgcttttgtaaatacagagggatttgtataagaaatatctttaaaaaaacccatatgctaatttgacataatttttgagaaaaatatatattcaggcgaattctcacaatgaacaataataagattaaaatagctttcccccgttgcagcgcatgggtattttttctagtaaaaataaaagataaacttagactcaaaacatttacaaaaacaacccctaaagttcctaaagcccaaagtgctatccacgatccatagcaagcccagcccaacccaacccaacccaacccaccccagtccagccaactggacaatagtctccacacccccccactatcaccgtgagttgtccgcacgcaccgcacgtctcgcagccaaaaaaaaaaaaagaaagaaaaaaaagaaaaagaaaaaacagcaggtgggtccgggtcgtgggggccggaaacgcgaggaggatcgcgagccagcgacgaggccggccctccctccgcttccaaagaaacgccccccatcgccactatatacatacccccccctctcctcccatccccccaaccctaccaccaccaccaccaccacctccacctcctcccccctcgctgccggacgacgagctcctcccccctccccctccgccgccgccgcgccggtaaccaccccgcccctctcctctttctttctccgttttttttttccgtctcggtctcgatctttggccttggtagtttgggtgggcgagaggcggcttcgtgcgcgcccagatcggtgcgcgggaggggcgggatctcgcggctggggctctcgccggcgtggatccggcccggatctcgcggggaatggggctctcggatgtagatctgcgatccgccgttgttgggggagatgatggggggtttaaaatttccgccatgctaaacaagatcaggaagaggggaaaagggcactatggtttatatttttatatatttctgctgcttcgtcaggcttagatgtgctagatctttctttcttctttttgtgggtagaatttgaatccctcagcattgttcatcggtagtttttcttttcatgatttgtgacaaatgcagcctcgtgcggagcttttttgtaggtagaccgcggaccggtcgcgcctcagcagtcgctgtcgttaacccagcggtactcgctgaggcgatcgcgggcccggtaccctgcaatgtgaccctagacttgtccatcttctggattggccaacttaattaatgtatgaaataaaaggatgcacacatagtgacatgctaatcactataatgtgggcatcaaagttgtgtgttatgtgtaattactaattatctgaataagagaaagagatcatccatatttcttatcctaaatgaatgtcacgtgtctttataattctttgatgaaccagatgcattttattaaccaattccatatacatataaatattaatcatatataattaatatcaattgggttagcaaaacaaatctagtctaggtgtgttttgctaattattgggggatagtgcaaaaagaaatctacgttctcaataattcagatagaaaacttaataaagtgagataatttacatagattgcttttatcctttgatatatgtgaaaccatgcatgatataaggaaaatagatagagaaataattttttacatcgttgaatatgtaaacaatttaattcaagaagctaggaatataaatattgaggagtttatgattattattattattttgatgttcaatgaagttttttttaatttcatatgaagtatacaaaaattcttcatagatttttgtttctatgccgtagttatctttaatatatttgtggttgaagaaatttattgctagaaacgaatggattgtcaatttttttttaaagcaaatatatatgaaattatactgtatattattttagtcatgattaaaatgtggccttaattgaatcatctttctcattcattttttcaaaagcatatcaggatgattgatatttatctattttaaaaattaatttaagggttcaaattaaatttaacttaaaagtgtcctaaccgtagttaaaggtttactttaaaaaaatactatgaaaaatctaatcttctatgaatcgacctgcaggatttaaatccatcgttctggggcctaacgggccaagctttccgatcctacctgtcacttcatcaaaaggacagtagaaaaggaaggtggcacctacaaatgccatcattgcgataaaggaaaggctatcattcaagatgcctctgccgacagtggtcccaaagatggacccccacccacgaggagcatcgtggaaaaagaagacgttccaaccacgtcttcaaagcaagtggattgatgtgatacttccactgacgtaagggatgacgcacaatcccactatccttcgcaagacccttcctctatataaggaagttcatttcatttggagaggacacgctgaaatcaccagtctctctctacaagatcggggatctctagctagacgatcgtttcgcatgattgaacaagatggattgcacgcaggttctccggccgcttgggtggagaggctattcggctatgactgggcacaacagacaatcggctgctctgatgccgccgtgttccggctgtcagcgcaggggcgcccggttctttttgtcaagaccgacctgtccggtgccctgaatgaactgcaggacgaggcagcgcggctatcgtggctggccacgacgggcgttccttgcgcagctgtgctcgacgttgtcactgaagcgggaagggactggctgctattgggcgaagtgccggggcaggatctcctgtcatctcaccttgctcctgccgagaaagtatccatcatggctgatgcaatgcggcggctgcatacgcttgatccggctacctgcccattcgaccaccaagcgaaacatcgcatcgagcgagcacgtactcggatggaagccggtcttgtcgatcaggatgatctggacgaagagcatcaggggctcgcgccagccgaactgttcgccaggctcaaggcgcgcatgcccgacggcgaggatctcgtcgtgacccatggcgatgcctgcttgccgaatatcatggtggaaaatggccgcttttctggattcatcgactgtggccggctgggtgtggcggaccgctatcaggacatagcgttggctacccgtgatattgctgaagagcttggcggcgaatgggctgaccgcttcctcgtgctttacggtatcgccgctcccgattcgcagcgcatcgccttctatcgccttcttgacgagttcttctgagcgggactctggggttcgaagaattcccgatcgttcaaacatttggcaataaagtttcttaagattgaatcctgttgccggtcttgcgatgattatcatataatttctgttgaattacgttaagcatgtaataattaacatgtaatgcatgacgttatttatgagatgggtttttatgattagagtcccgcaattatacatttaatacgcgatagaaaacaaaatatagcgcgcaaactaggataaattatcgcgcgcggtgtcatctatgttactagatcggggatatcgcgtgtctttataattctttgatgaaccagatgcattttattaaccaattccatatacatataaatattaatcatatataattaatatcaattgggttagcaaaacaaatctagtctaggtgtgttttgctaattattgggggatagtgcaaaaagaaatctacgttctcaataattcagatagaaaacttaataaagtgagataatttacatagattgcttttatcctttgatatatgtgaaaccatgcatgatataaggaaaatagatagagaaataattttttacatcgttgaatatgtaaacaatttaattcaagaagctaggaatataaatattgaggagtttatgattattattattattttgatgttcaatgaagttttttttaatttcatatgaagtatacaaaaattcttcatagatttttgtttctatgccgtagttatctttaatatatttgtggttgaagaaatttattgctagaaacgaatggattgtcaatttttttttaaagcaaatatatatgaaattatactgtatattattttagtcatgattaaaatgtggccttaattgaatcatctttctcattcattttttcaaaagcatatcaggatgattgatatttatctattttaaaaattaatttaagggttcaaattaaatttaacttaaaagtgtcctaaccgtagttaaaggtttactttaaaaaaatactatgaaaaatctaatcttctatgaatcgaccgctgatcgatcgcggccgctgg

SEQ ID NO: 12604 - DNA, 9769 bp, Artificial Sequence
  synthetic Sequence
ggtccgatgtgagacttttcaacaaagggtaatatccggaaacctcctcggattccattgcccagctatctgtcactttattgtgaagatagtggaaaaggaaggtggctcctacaaatgccatcattgcgataaaggaaaggccatcgttgaagatgcctctgccgacagtggtcccaaagatggacccccacccacgaggagcatcgtggaaaaagaagacgttccaaccacgtcttcaaagcaagtggattgatgtgatggtccgattgagacttttcaacaaagggtaatatccggaaacctcctcggattccattgcccagctatctgtcactttattgtgaagatagtggaaaaggaaggtggctcctacaaatgccatcattgcgataaaggaaaggccatcgttgaagatgcctctgccgacagtggtcccaaagatggacccccacccacgaggagcatcgtggaaaaagaagacgttccaaccacgtcttcaaagcaagtggattgatgtgatatctccactgacgtaagggatgacgcacaatcccactatccttcgcaagacccttcctctatataaggaagttcatttcatttggagaggaccaggtggtaccggcgcgcctcagcagtcgctgtcgttaacccagcggtactcgctgaggcgatcgcgggccctgatcacctgtcgtacagtatttctacatttgatgtgtgatttgtgaagaacatcaaacaaaacaagcactggctttaatatgatgataagtattatggtaattaattaattggcaaaaacaacaatgaagctaaaattttatttattgagccttgcggttaatttcttgtgatgatctttttttttattttctaattatatatagtttcctttgctttgaaatgctaaaggtttgagagagttatgctctttttttcttcctctttcttttttaactttatcatacaaattttgaataaaaatgtgagtacattgagctcatttaaataagcttgatggggatcagattgtcgtttcccgccttcagtttaaactatcagtgtttgacaggatatattggcgggtaaacctaagagaaaagagcgtttattagaataatcggatatttaaaagggcgtgaaaaggtttatccgttcgtccatttgtatgtgcatgccaaccacagggttcccctcgggagtgcttggcattccgtgcgataatgacttctgttcaaccacccaaacgtcggaaagcctgacgacggagcagcattccaaaaagatcccttggctcgtctgggtcggctagaaggtcgagtgggctgctgtggcttgatccctcaacgcggtcgcggacgtagcgcagcgccgaaaaatcctcgatcggaggaccgaaggagctaaccgcttttttgcacaacatgggggatcatgtaactcgccttgatcgttgggaaccggagctgaatgaagccataccaaacgacgagcgtgacaccacgatgcctgcagcatctaacgcttgagttaagccgcgccgcgaagcggcgtcggcttgaacgaattgttagacattatttgccgactaccttggtgatctcgcctttcacgtagtgaacaaattcttccaactgatctgcgcgcgaggccaagcgatcttcttgtccaagataagcctgcctagcttcaagtatgacgggctgatactgggccggcaggcgctccattgcccagtcggcagcgacatccttcggcgcgattttgccggttactgcgctgtaccaaatgcgggacaacgtaagcactacatttcgctcatcgccagcccagtcgggcggcgagttccatagcgttaaggtttcatttagcgcctcaaatagatcctgttcaggaaccggatcaaagagttcctccgccgctggacctaccaaggcaacgctatgttctcttgcttttgtcagcaagatagccagatcaatgtcgatcgtggctggctcgaagatacctgcaagaatgtcattgcgctgccattctccaaattgcagttcgcgcttagctggataacgccacggaatgatgtcgtcgtgcacaacaatggtgacttctacagcgcggagaatctcgctctctccaggggaagccgaagtttccaaaaggtcgttgatcaaagctcgccgcgttgtttcatcaagccttacggtcaccgtaaccagcaaatcaatatcactgtgtggcttcaggccgccatccactgcggagccgtacaaatgtacggccagcaacgtcggttcgagatggcgctcgatgacgccaactacctctgatagttgagtcgatacttcggcgatcaccgcttccctcatgatgtttaactcctgaattaagccgcgccgcgaagcggtgtcggcttgaatgaattgttaggcgtcatcctgtgctcccgacctgcagcaatggcaacaacgttgcgcaaactattaactggcgaactacttactctagcttcccggcaacaattaatagactggatggaggcggataaagttgcaggaccacttctgcgctcggcccttccggctggctggtttattgctgataaatctggagccggtgagcgtgggtctcgcggtatcattgcagcactggggccagatggtaagccctcccgtatcgtagttatctacacgacggggagtcaggcaactatggatgaacgaaatagacagatcgctgagataggtgcctcactgattaagcattggtaactgtcagaccaagtttactcatatatactttagattgatttaaaacttcatttttaatttaaaaggatctaggtgaagatcctttttgataatctcatgaccaaaatcccttaacgtgagttttcgttccactgagcgtcagaccccgtagaaaagatcaaaggatcttcttgagatcctttttttctgcgcgtaatctgctgcttgcaaacaaaaaaaccaccgctaccagcggtggtttgtttgccggatcaagagctaccaactctttttccgaaggtaactggcttcagcagagcgcagataccaaatactgtccttctagtgtagccgtagttaggccaccacttcaagaactctgtagcaccgcctacatacctcgctctgctaatcctgttaccagtggctgctgccagtggcgataagtcgtgtcttaccgggttggactcaagacgatagttaccggataaggcgcagcggtcgggctgaacggggggttcgtgcacacagcccagcttggagcgaacgacctacaccgaactgagatacctacagcgtgagctatgagaaagcgccacgcttcccgaagggagaaaggcggacaggtatccggtaagcggcagggtcggaacaggagagcgcacgagggagcttccagggggaaacgcctggtatctttatagtcctgtcgggtttcgccacctctgacttgagcgtcgatttttgtgatgctcgtcaggggggcggagcctatggaaaaacgccagcaacgcggcctttttacggttcctggccttttgctggccttttgctcacatgttctttcctgcgttatcccctgattctgtggataaccgtattaccgcctttgagtgagctgataccgctcgccgcagccgaacgaccgagcgcagcgagtcagtgagcgaggaagcggaagagcgcctgatgcggtattttctccttacgcatctgtgcggtatttcacaccgcatatggtgcactctcagtacaatctgctctgatgccgcatagttaagccagtatacactccgctatcgctacgtgactgggtcatggctgcgccccgacacccgccaacacccgctgacgcgccctgacgggcttgtctgctcccggcatccgcttacagacaagctgtgaccgtctccgggagctgcatgtgtcagaggttttcaccgtcatcaccgaaacgcgcgaggcagctgcggtaaagctcatcagcgtggtcgtgaagcgattcacagatgtctgcctgttcatccgcgtccagctcgttgagtttctccagaagcgttaatgtctggcttctgataaagcgggccatgttaagggcggttttttcctgtttggtcactgatgcctccgtgtaagggggatttctgttcatgggggtaatgataccgatgaaacgagagaggatgctcacgatacgggttactgatgatgaacatgcccggttactggaacgttgtgagggtaaacaactggcggtatggatgcggcgggaccagagaaaaatcactcagggtcaatgccagcgcttcgttaatacagatgtaggtgttccacagggtagccagcagcatcctgcgatgcagatccggaacataatggtgcagggcgctgacttccgcgtttccagactttacgaaacacggaaaccgaagaccattcatgttgttgctcaggtcgcagacgttttgcagcagcagtcgcttcacgttcgctcgcgtatcggtgattcattctgctaaccagtaaggcaaccccgccagcctagccgggtcctcaacgacaggagcacgatcatgcgcacccgtggccaggacccaacgctgcccgagatgcgccgcgtgcggctgctggagatggcggacgcgatggatatgttctgccaagggttggtttgcgcattcacagttctccgcaagaattgattggctccaattcttggagtggtgaatccgttagcgaggtgccgccggcttccattcaggtcgaggtggcccggctccatgcaccgcgacgcaacgcggggaggcagacaaggtatagggcggcgcctacaatccatgccaacccgttccatgtgctcgccgaggcggcataaatcgccgtgacgatcagcggtccaatgatcgaagttaggctggtaagagccgcgagcgatccttgaagctgtccctgatggtcgtcatctacctgcctggacagcatggcctgcaacgcgggcatcccgatgccgccggaagcgagaagaatcataatggggaaggccatccagcctcgcgtcgcgaacgccagcaagacgtagcccagcgcgtcggccgccatgccggcgataatggcctgcttctcgccgaaacgtttggtggcgggaccagtgacgaaggcttgagcgagggcgtgcaagattccgaataccgcaagcgacaggccgatcatcgtcgcgctccagcgaaagcggtcctcgccgaaaatgacccagagcgctgccggcacctgtcctacgagttgcatgataaagaagacagtcataagtgcggcgacgatagtcatgccccgcgcccaccggaaggagctgactgggttgaaggctctcaagggcatcggtcgatcgaccctttccgacgctcaccgggctggttgccctcgccgctgggctggcggccgtctatggccctgcaaacgcgccagaaacgccgtcgaagccgtgtgcgagacaccgcggccggccgccggcgttgtggatacctcgcggaaaacttggccctcactgacagatgaggggcggacgttgacacttgaggggccgactcacccggcgcggcgttgacagatgaggggcaggctcgatttcggccggcgacgtggagctggccagcctcgcaaatcggcgaaaacgcctgattttacgcgagtttcccacagatgatgtggacaagcctggggataagtgccctgcggtattgacacttgaggggcgcgactactgacagatgaggggcgcgatccttgacacttgaggggcagagtgctgacagatgaggggcgcacctattgacatttgaggggctgtccacaggcagaaaatccagcatttgcaagggtttccgcccgtttttcggccaccgctaacctgtcttttaacctgcttttaaaccaatatttataaaccttgtttttaaccagggctgcgccctgtgcgcgtgaccgcgcacgccgaaggggggtgcccccccttctcgaaccctcccggcccgctaacgcgggcctcccatccccccaggggctgcgcccctcggccgcgaacggcctcaccccaaaaatggcagccaagctaggaaaagtcccatgtggatcactccgttgccccgtcgctcaccgtgttggggggaaggtgcacatggctcagttctcaatggaaattatctgcctaaccggctcagttctgcgtagaaaccaacatgcaagctccaccgggtgcaaagcggcagcggcggcaggatatattcaattgtaaatggcttcatgtccgggaaatctacatggatcagcaatgagtatgatggtcaatatggagaaaaagaaagagtaattaccaattttttttcaattcaaaaatgtagatgtccgcagcgttattataaaatgaaagtacattttgataaaacgacaaattacgatccgtcgtatttataggcgaaagcaataaacaaattattctaattcggaaatctttatttcgacgtgtctacattcacgtccaaatgggggcttagatgagaaacttcacgatcgatgcggccaccactcgagaagcttactagtcaacaattggccaatctttgttctaaattgctaataaacgaccatttccgtcaattctccttggttgcaacagtctacccgtcaaatgtttactaatttataagtgtgaagtttgaattatgaaagacgaaatcgtattaaaaattcacaagaataaacaactccatagattttcaaaaaaacagtcacgagaaaaaaaccacagtccgtttgtctgctcttctagtttttattatttttctattaatagttttttgttatttcgagaataaaatttgaacgatgtccgaaccacaaaagccgagccgataaatcctaagccgagcctaactttagccgtaaccatcagtcacggctcccgggctaattcatttgaaccgaatcataatcaacggtttagatcaaactcaaaacaatctaacggcaacatagacgcgtcggtgagctaaaaagagtgtgaaagccaggtcaccatagcattgtctctcccagattttttatttgggaaataatagaagaaatagaaaaaaataaaagagtgagaaaaatcgtagagctatatattcgcacatgtactcgtttcgctttccttagtgttagctgctgccgctgttgtttctcctccatttctctatctttctctctcgctgcttctcgaatcttctgtatcatcttcttcttcttcaaggtgagtctctagatccgttcgcttgattttgctgctcgttagtcgttattgttgattctctatgccgatttcgctagatctgtttagcatgcgttgtggttttatgagaaaatctttgttttgggggttgcttgttatgtgattcgatccgtgcttgttggatcgatctgagttaattcttaaggtttatgtgttagatctatggagtttgaggattcttctcgcttctgtcgatctctcgctgttatttttgtttttttcagtgaagtgaagttgtttagttcgaaatgacttcgtgtatgctcgattgatctggttttaatcttcgatctgttaggtgttgatgtttacaagtgaattctagtgttttctcgttgagatctgtgaagtttgaacctagttttctcaataatcaacatatgaagcgatgtttgagtttcaataaacgctgctaatcttcgaaactaagttgtgatctgattcgtgtttacttcatgagcttatccaattcatttcggtttcattttactttttttttagtgaaccatggcgcaagttagcagaatctgcaatggtgtgcagaacccatctcttatctccaatctctcgaaatccagtcaacgcaaatctcccttatcggtttctctgaagacgcagcagcatccacgagcttatccgatttcgtcgtcgtggggattgaagaagagtgggatgacgttaattggctctgagcttcgtcctcttaaggtcatgtcttctgtttccacggcgtgcatgcttcatggagcttcatctaggccagctactgccaggaagtctagcgggctcagtggcaccgtgcgcatccctggcgataaaagtatttcacacaggagcttcatgttcggaggacttgctagtggagagacgagaatcactggtttgcttgagggcgaagatgttatcaacaccggtaaggcgatgcaagcaatgggtgccagaatccgaaaagagggcgatacgtggatcatcgacggtgttggtaacggaggattgctcgctcccgaagcgccacttgactttgggaacgcagctacggggtgccgtcttactatgggactggtaggcgtgtatgactttgactctaccttcatcggtgacgcgagcctcactaagagaccaatgggacgagtgctgaatcccctgagggagatgggtgtccaggtgaaatctgaggatggtgatcgtcttccggttactctgcgaggccccaagacccccacgccaatcacgtacagggttccgatggcgtcagcacaggtcaagtcagcggtactcctggcgggcctcaacacacctggaatcacaaccgtgattgaacccatcatgactagagaccacacggagaagatgttgcagggtttcggcgctaatctaacggtcgaaaccgacgccgacggcgtgaggacaatccgcttggagggcagaggtaaactgactggccaagtcatcgatgtgcctggagatccctcgtccacagcgtttcccctcgtagctgcgttgctcgtccctggatctgatgtgacgatcctgaatgtcctcatgaatccaactagaaccggcctcatcctcacattgcaggagatgggtgctgacatcgaggttatcaatcctaggttggcaggtggagaggatgtggccgatctgcgcgtgcgttctagtacactcaaaggcgtgaccgtccctgaggatcgcgctccatccatgatcgacgagtaccccattctcgccgttgctgctgcgtttgccgagggcgcaactgtaatgaacggccttgaggagttgagggttaaggagagtgacaggctgtccgcggtggcgaatggcctgaagctaaacggcgtggactgcgacgaaggtgaaacgtcccttgtagtccgtggtcgcccagacgggaaggggttggggaatgcttcgggagctgctgtggcgacgcaccttgatcatagaatcgccatgtcatttctggtgatgggacttgtctccgagaatccggtgaccgttgacgatgctaccatgatcgccacctcctttcctgagttcatggacctcatggcaggcttgggggccaagatcgagctgtctgatactaaggccgcttgaattcccgatcgttcaaacatttggcaataaagtttcttaagattgaatcctgttgccggtcttgcgatgattatcatataatttctgttgaattacgttaagcatgtaataattaacatgtaatgcatgacgttatttatgagatgggtttttatgattagagtcccgcaattatacatttaatacgcgatagaaaacaaaatatagcgcgcaaactaggataaattatcgcgcgcggtgtcatctatgttactagatcggggatcccacgtgcggaccgcctgcaggccgcgttatcaagctaactgca
